(19) United States
(12) Patent Application Publication
(10) Pub. No.: US 2011/0262432 A1
(43) Pub. Date: Oct. 27, 2011

(54) MUTATED NETRIN 4 PROTEINS, FRAGMENTS THEREOF AND THEIR USES AS DRUGS

(75) Inventors: Jean Plouet, Paris (FR); Isabelle Clarisse Solange Plouet, Paris (FR); Claire Charlotte Plouet, Paris (FR); Anne Florence Plouet, Paris (FR); Laurence Leconte, Antony (FR); Esma Lejmi, Villejuif (FR)

(73) Assignee: CENTRE NATIONAL DE LA RECHERCHE SCIENTIFIQUE, PARIS CEDEX 16 (FR)

(21) Appl. No.: 13/054,731

(22) PCT Filed: Jul. 16, 2009
(86) PCT No.: PCT/EP09/59189

§ 371 Date: Mar. 31, 2011

(30) Foreign Application Priority Data
Jul. 18, 2008 (FR) 08290707.2

(51) Int. Cl. A61K 39/395; C07H 21/00; C12N 15/63; C07K 16/18; C07K 16/42; A61K 38/17; A61K 31/7088; A61K 35/12; A61P 35/00; A61P 35/02; A61P 27/02; A61P 29/00; A61P 3/04; A61P 9/10; A61P 17/06; A61P 25/28; A61P 19/08; A61K 33/24; A61P 27/06; A61P 27/10; A61P 19/02; A61P 9/00; A61P 1/00; C07K 14/47

(52) U.S. Cl. 424/133.1; 530/350; 536/23.5; 435/320.1; 530/387.9; 530/387.2; 514/21.2; 514/44 R; 424/93.7; 514/19.3; 514/19.6; 514/20.8; 514/16.6; 514/4.8; 424/139.1; 514/1.9; 514/18.6; 514/17.8; 514/16.7; 424/649

(57) ABSTRACT

A mutated protein includes the sequence of wild type netrin 4, represented by SEQ ID NO: 2, wherein at least one amino acid of the amino acids at position (13, 68, 183, 205, 234, 331, 332, 353, 472, 515, 589, 625, 626, 627) and (628) is mutated enabling thus to confer 1 to 15 mutations to the wild type protein, or, truncated protein derived from the mutated protein, wherein the 19 first contiguous, or the 31 first contiguous amino acids at the N-terminus part of the mutated protein are deleted; and/or the mutated protein being deleted of all amino acids located after the amino acid in position (477) or of all amino acids located after the amino acid in position (515).

[0001] The present invention relates to a new mutated netrin 4, and fragments thereof. It also relates to the use of said mutated netrin 4 and said fragments as drugs, in particular as anti-angiogenic agents.

[0002] Netrin 4 belongs to the netrins family, which are axons guiding molecules. To this day, 4 members of this family are known (netrins 1, G, 3, and 4). Netrin 4 is a protein consisting of a basic C-terminal domain interacting with heparin, 3 EGF-domains, and a laminin-domain (Yurchenco P D, Wadsworth W G (2004) Assembly and tissue functions of early embryonic laminins and netrins. Curr Opin Cell Biol. 16(5):572-9).

[0003] Patent application US 2003/0207347A1, published on Nov. 6, 2003, describes the native netrin 4 and uses thereof. More particularly, this application describes a netrin 4-derived polypeptide presenting properties for modulating angiogenesis, as well as the use of netrin 4 in a process of modulation of the vascular development, in particular of angiogenesis, and more particularly of inhibition of angiogenesis, in particular in tumors.

[0004] International patent application WO 2006/054000 describes the use of a mutated netrin 4 for the preparation of a drug for the prevention or the treatment of tumoral or non-tumoral pathologies, said mutated netrin 4 having an anti-angiogenic activity.

[0005] However, among sequences disclosed in this document, some improper mutated netrin 4 sequences comprise errors of sequencing.

[0006] An aim of the present invention is to provide new anti-angiogenic agents.

[0007] Another aim of the present invention is to provide a combination treatment allowing the increase of the treatment's efficiency involving angiogenesis, and in particular of usual anti-tumoral treatments, or of anti-angiogenic treatments used in pathologies other than tumors.

[0008] Until today, there is NO known therapeutic agent able to interact with usual drugs as used for the treatment of age-related macular degeneration, or of other ocular diseases involving a neovascularization.

[0009] The present invention relates to a mutated protein comprising or consisting of the sequence of wild type netrin 4, represented by SEQ ID NO: 2, wherein at least one amino acid of the amino acids at positions 13, 68, 183, 205, 234, 331, 332, 353, 472, 515, 589, 625, 626, 627 and 628 is mutated enabling thus to confer 1 to 15 mutations to said wild type protein,

[0010] or, a truncated protein derived from said mutated protein, wherein
[0011] the 19 first contiguous, or the 31 first contiguous amino acids at the N-terminus part of said mutated protein are deleted, and/or
[0012] said mutated protein being deleted of all the amino acids located after the amino acid in position 477 or of the all amino acids located after the amino acid in position 515,
   with the proviso that
[0013] a. the mutated proteins which contain only one mutation at position 353 or 472, are excluded
[0014] b. the mutated proteins which contain only two mutations at position 332 and 353, or 332 and 472, or 353 and 472, are excluded,
[0015] c. the mutated protein which contains only three mutations at the positions 332 and 353 and 472, are excluded,
[0016] d. the mutated protein which contains 9 mutations and in which the amino acids at the positions 472 and 589 and 625 and 626 and 627 and 628 are wild type, is excluded,
[0017] e. the mutated proteins which contain 13 mutations and in which the amino acids at the positions 13 and 331, or 13 and 332, or 13 and 472 are wild type, are excluded,
[0018] f. the mutated proteins which contain 12 mutations and in which the amino acids at the following positions 13 and 331 and 332, are wild type, are excluded, or
[0019] g. when said mutated protein has 14 mutations and a wild type amino acid in position 13, or has 15 mutations, said mutated protein contains a nine amino acid extension at the C-terminus,
[0020] h. the truncated proteins wherein the mutated protein is only deleted of all amino acids located after the amino acid in position 477 or only after the amino acid in position 515, and which contain only one mutation at position 353 or 472, or which contain only two mutations at position 332 and 353, or 332 and 472, or 353 and 472, or contain only three mutations at the positions 332 and 353 and 472, are excluded, and
[0021] i. the truncated proteins that consist of the following sequence: SEQ ID NO: 188, SEQ ID NO: 198, SEQ ID NO: 248, SEQ ID NO: 250, SEQ ID NO: 266, SEQ ID NO: 274, SEQ ID NO: 320, SEQ ID NO: 328, SEQ ID NO: 434 and SEQ ID NO: 436, are excluded.
   A preferred embodiment of the invention relates to a mutated protein comprising or consisting of the sequence of wild type netrin 4, represented by SEQ ID NO: 2, having from 1 to 15 mutations to said wild type protein, said mutated protein having a mutation at the amino acid at position 331, and said protein being possibly mutated in one at least of the amino acids at the following positions: 13, 68, 183, 205, 234, 332, 353, 472, 515, 589, 625, 626, 627 and 628,

[0022] or, truncated protein derived from said mutated protein, wherein
[0023] the 19 first contiguous, or the 31 first contiguous amino acids at the N-terminus part of said mutated protein are deleted, and/or
[0024] said mutated protein being deleted of all the amino acids located after the amino acid in position 477 or of the all amino acids located after the amino acid in position 515,
   with the proviso that
[0025] a. the mutated protein which contains 9 mutations and in which the amino acids at the positions 472 and 589 and 625 and 626 and 627 and 628 are wild type, is excluded,
[0026] b. the mutated proteins which contain 13 mutations and in which the amino acids at the positions 13 and 331, or 13 and 332, or 13 and 472 are wild type, are excluded,
[0027] c. the mutated proteins which contain 12 mutations and in which the amino acids at the following positions 13 and 331 and 332, are wild type, are excluded, or
[0028] d. when said mutated protein has 14 mutations and a wild type amino acid in position 13, or has 15 mutations, said mutated protein contains a nine amino acid extension at the C-terminus,
[0029] e. the truncated proteins wherein the mutated protein is only deleted of all amino acids located after the amino acid in position 477 or only after the amino acid in position 515, and which contain only one mutation at position 353 or 472, or which contain only two mutations at position 332 and 353, or 332 and 472, or 353 and 472, or contain only three mutations at the positions 332 and 353 and 472, are excluded, and
[0030] f. the truncated proteins that consist of the following sequence: SEQ ID NO: 188, SEQ ID NO: 198, SEQ ID NO: 266, SEQ ID NO: 274, SEQ ID NO: 320 and SEQ ID NO: 328, are excluded.

[0031] According to the invention, SEQ ID NO: 2 represents the sequence of the wild type netrin 4. Netrin 4 is a protein containing 628 amino acids.

[0032] In one particular embodiment of the invention, the mutated amino acids at the amino acids at positions 13, 68, 183, 205, 234, 331, 332, 353, 472, 515, 589, 625, 626, 627 and 628 are respectively arginine in position 13, threonine in position 68, proline in position 183, tyrosine in position 205, tyrosine in position 234, threonine in position 331, arginine in position 332, serine in position 353, tyrosine in position 472, lysine in position 515, alanine in position 589, glutamate in position 625, serine in position 626, alanine in position 627, and serine in position 628.

[0033] The term “and/or” wherever used herein includes the meaning of “and”, “or” and “all or any other combination of the elements connected by said term”.

[0034] According to the invention, positions 13, 68, 183, 205, 234, 331, 332, 353, 472, 515, 589, 625, 626, 627 and 628 are defined as the position of the amino acids from the first methionine of netrin 4, corresponding to the position 1. Thus, the numbering is defined from the first amino acid at the N-terminus.

[0035] According to the invention, the truncated protein is defined such that the mutated protein, i.e. the mutated netrin 4, is liable to be deleted:
[0036] in the N-terminus part, of
   [0037] the 19 first contiguous amino acids, or
   [0038] the 31 first contiguous amino acids,
      and/or
[0039] in the C-terminus part, of
   [0040] all the amino acids after the amino acid at the position 477, or
   [0041] all the amino acids after the amino acid at the position 515.

[0042] According to the invention, the “19 first amino acids at the N-terminus part of mutated protein are deleted” means that all the amino acids from the amino acid at the position 1, i.e. methionine, to the amino acid at the position 19 are deleted. Thus, the corresponding protein begins at the amino acid at the position 20 of the non-truncated protein.

[0043] According to the invention, the terms “31 first amino acids at the N-terminus part of mutated protein are deleted” mean that all the amino acids from the amino acid at the position 1, i.e. methionine, to the amino acid at the position 31 are deleted. Thus, the corresponding truncated protein begins at the amino acid at the position 32 of the non-truncated protein.

[0044] According to the invention, the terms “the mutated protein is deleted after the amino acid in position 477” mean that all the amino acids after the amino acid at the position 477 are deleted. Thus, the corresponding truncated protein stops at the amino acid at the position 477.

[0045] According to the invention, the “the mutated protein is deleted after the amino acid in position 515” means that all the amino acids after the amino acid at the position 515 are deleted. Thus, the corresponding truncated protein stops at the amino acid at the position 515.

[0046] Thus, it is possible to obtain 8 truncated proteins of the present invention, corresponding to the following ones:
[0047] a truncated protein wherein only the first 19 contiguous amino acids are deleted,
[0048] a truncated protein wherein only the first 31 contiguous amino acids are deleted,
[0049] a truncated protein wherein only all the amino acids after the amino acid at the position 477 are deleted,
[0050] a truncated protein wherein only all the amino acids after the amino acid at the position 515 are deleted,
[0051] a truncated protein wherein the first 19 contiguous amino acids are deleted and the amino acids after the amino acid at the position 477 are deleted,
[0052] a truncated protein wherein the first 31 contiguous amino acids are deleted and the amino acids after the amino acid at the position 477 are deleted,
[0053] a truncated protein wherein the first 19 contiguous amino acids are deleted and the amino acids after the amino acid at the position 515 are deleted.
[0054] a truncated protein wherein the first 31 contiguous amino acids are deleted and all the amino acids after the amino acid at the position 515 are deleted.

[0055] According to the invention, terms “the mutated proteins which contain only one mutation at position 353” define mutated proteins wherein all the amino acids at the positions 13, 68, 183, 205, 234, 331, 332, 472, 515, 589, 625, 626, 627 and 628 are wild type and only the amino acid at the position 353 is mutated.

[0056] According to the invention, terms “the mutated proteins which contain only one mutation at position 472” define mutated proteins wherein all the amino acids at the positions 13, 68, 183, 205, 234, 331, 332, 353, 515, 589, 625, 626, 627 and 628 are wild type and only the amino acid at the position 472 is mutated.

[0057] According to the invention, terms “a nine amino acid extension at the C-terminus” means that a sequence of nine contiguous amino acids is added immediately after the last amino acid of the protein, i.e. immediately after the last amino acid at the C-terminus part of said protein.

[0058] According to the invention, terms “the truncated proteins wherein the mutated protein is only deleted after the amino acid in position 477 or only after the amino acid in position 515, and which contain only one mutation at position 353 or 472, or which contain only two mutations at position 332 and 353, or 332 and 472, or 353 and 472, or contain only three mutations at the positions 332 and 353 and 472, are excluded” means that the following proteins are excluded:
[0059] a. a protein having one mutation at the position 353 and being deleted after the amino acid at the position 477,
[0060] b. a protein having one mutation at the position 472 and being deleted after the amino acid at the position 477,
[0061] c. a protein having one mutation at the position 353 and being deleted after the amino acid at the position 515,
[0062] d. a protein having one mutation at the position 472 and being deleted after the amino acid at the position 515,
[0063] e. a protein having two mutations at the positions 332 and 353 and being deleted after the amino acid at the position 477,
[0064] f. a protein having two mutations at the positions 332 and 353 and being deleted after the amino acid at the position 515,
[0065] g. a protein having two mutations at the positions 332 and 472 and being deleted after the amino acid at the position 477,
[0066] h. a protein having two mutations at the positions 332 and 472 and being deleted after the amino acid at the position 515,
[0067] i. a protein having two mutations at the positions 353 and 472 and being deleted after the amino acid at the position 477,
[0068] j. a protein having two mutations at the positions 353 and 472 and being deleted after the amino acid at the position 515,
[0069] k. a protein having there mutations at the positions 332 and 353 and 472 and being deleted after the amino acid at the position 477, and
[0070] l. a protein having three mutations at the positions 332 and 353 and 472 and being deleted after the amino acid at the position 515.

[0071] According to the invention, the proviso concerning the “mutated protein(s)” does not concern the “truncated protein(s)” and vice versa. Thus, if a mutated protein is excluded, without any other mention, the truncated protein, derived from said excluded protein, is not excluded.

[0072] For instance, the mutated protein which contain 13 mutations and in which the amino acids at the following positions 13 and 331 and 332, are wild type, is excluded, but the truncated proteins derived from said mutated protein are not excluded.
[0073] In one preferred embodiment, the present invention relates to a mutated protein, or a truncated protein derived from said mutated protein defined above, wherein the sequence of said mutated protein contains:
   [0074] one or two or three or four mutations of the amino acids at 13, 68, 183, 205, 234, 331, 332, 353, 472, 515, 589, 625, 626, 627 and 628, or
   [0075] one or two or three or four mutations of the amino acids at 13, 68, 183, 205, 234, 331, 332, 353, 472, 515, 589, 625, 626, 627 and 628, and contains a nine amino acid extension at the C-terminus, or
   [0076] ten or eleven or twelve or thirteen or fourteen mutations of the amino acids at 13, 68, 183, 205, 234, 331, 332, 353, 472, 515, 589, 625, 626, 627 and 628,
   [0077] ten or eleven or twelve or thirteen, or fourteen or fifteen mutations of the amino acids at the positions 13, 68, 183, 205, 234, 331, 332, 353, 472, 515, 589, 625, 626, 627 and 628 and contains a nine amino acid extension at the C-terminus.
[0078] In one preferred embodiment, the present invention relates to a mutated protein, or a truncated protein derived from said mutated protein above defined, wherein the sequence of said mutated protein contains a mutation at the amino acid at position 331, and contains also:
   [0079] one or two or three mutations of the amino acids at 13, 68, 183, 205, 234, 332, 353, 472, 515, 589, 625, 626, 627 and 628, or
   [0080] one or two or three mutations of the amino acids at 13, 68, 183, 205, 234, 332, 353, 472, 515, 589, 625, 626, 627 and 628, and contains a nine amino acid extension at the C-terminus, or
   [0081] nine or ten or eleven or twelve or thirteen mutations of the amino acids at 13, 68, 183, 205, 234, 332, 353, 472, 515, 589, 625, 626, 627 and 628,
   [0082] nine or ten or eleven or twelve or thirteen, or fourteen mutations of the amino acids at the positions 13, 68, 183, 205, 234, 332, 353, 472, 515, 589, 625, 626, 627 and 628 and contains a nine amino acid extension at the C-terminus.
[0083] In one other preferred embodiment, the invention relates to
   [0084] a mutated protein defined above, consisting of
      [0085] SEQ ID NO: 6 or SEQ ID NO: 8, or
      [0086] the sequence of netrin 4, represented by SEQ ID NO: 2, containing
         [0087] one or two or three or four mutations and characterized in that it consists of one of the following sequence SEQ ID NO: 2q, q varying from 31 to 39, or
         [0088] ten or eleven or twelve or thirteen or fourteen and characterized in that it consists of one of the following sequence of SEQ ID NO: 2q, q varying from 5 to 30, or
   [0089] a truncated mutated protein derived from said mutated protein defined above, consisting of one of the sequences SEQ ID NO: 2q, q varying from 40 to 93, from 95 to 98, from 100 to 123, from 126 to 132, from 134 to 136, from 138 to 159, from 161 to 163, from 165 to 216 and from 219 to 279.
[0090] In one other preferred embodiment, the invention relates to a mutated protein defined above, consisting of:
   [0091] SEQ ID NO: 6 or SEQ ID NO: 8, or
   [0092] the sequence of netrin 4, represented by SEQ ID NO: 2, containing
      [0093] one or two or three or four mutations and characterized in that it consists of one of the following sequence SEQ ID NO: 2q, q equals to 31, or varying from 33 to 39, or
      [0094] ten or eleven or twelve or thirteen or fourteen mutations and characterized in that it consists of one of the following sequence of SEQ ID NO: 2q, q varying from 6 to 8, or from 12 to 14, or equals 18, or equals 20, or varying from 23 to 25, or equals to 29, or
   [0095] a truncated mutated protein derived from said mutated protein, consisting of one of the following sequences SEQ ID NO: 80, SEQ ID NO: 84, SEQ ID NO: 86, SEQ ID NO: 88, SEQ ID NO: 96, SEQ ID NO: 98, SEQ ID NO: 100, SEQ ID NO: 108, SEQ ID NO: 112, SEQ ID NO: 120, SEQ ID NO: 122, SEQ ID NO: 124, SEQ ID NO: 126, SEQ ID NO: 128, SEQ ID NO: 130, SEQ ID NO: 132, SEQ ID NO: 134, SEQ ID NO: 138, SEQ ID NO: 140, SEQ ID NO: 142, SEQ ID NO: 150, SEQ ID NO: 152, SEQ ID NO: 154, SEQ ID NO: 162, SEQ ID NO: 166, SEQ ID NO: 174, SEQ ID NO: 176, SEQ ID NO: 178, SEQ ID NO: 180, SEQ ID NO: 182, SEQ ID NO: 184, SEQ ID NO: 186, SEQ ID NO: 190, SEQ ID NO: 194, SEQ ID NO: 196, SEQ ID NO: 206, SEQ ID NO: 208, SEQ ID NO: 210, SEQ ID NO: 218, SEQ ID NO: 222, SEQ ID NO: 228, SEQ ID NO: 230, SEQ ID NO: 232, SEQ ID NO: 240, SEQ ID NO: 244, SEQ ID NO: 252, SEQ ID NO: 254, SEQ ID NO: 256, SEQ ID NO: 258, SEQ ID NO: 260, SEQ ID NO: 262, SEQ ID NO: 264, SEQ ID NO: 270, SEQ ID NO: 272, SEQ ID NO: 282, SEQ ID NO: 284, SEQ ID NO: 286, SEQ ID NO: 294, SEQ ID NO: 298, SEQ ID NO: 306, SEQ ID NO: 308, SEQ ID NO: 310, SEQ ID NO: 312, SEQ ID NO: 314, SEQ ID NO: 316, SEQ ID NO: 318, SEQ ID NO: 324, SEQ ID NO: 326, SEQ ID NO: 336, SEQ ID NO: 338, SEQ ID NO: 340, SEQ ID NO: 348, SEQ ID NO: 352, SEQ ID NO: 360, SEQ ID NO: 362, SEQ ID NO: 364, SEQ ID NO: 366, SEQ ID NO: 368, SEQ ID NO: 370, SEQ ID NO: 372, SEQ ID NO: 374, SEQ ID NO: 376, SEQ ID NO: 380, SEQ ID NO: 382, SEQ ID NO: 384, SEQ ID NO: 392, SEQ ID NO: 394, SEQ ID NO: 396, SEQ ID NO: 404, SEQ ID NO: 408, SEQ ID NO: 414, SEQ ID NO: 416, SEQ ID NO: 418, SEQ ID NO: 426, SEQ ID NO: 430, SEQ ID NO: 438, SEQ ID NO: 440, SEQ ID NO: 442, SEQ ID NO: 444, SEQ ID NO: 446, SEQ ID NO: 448, SEQ ID NO: 450, SEQ ID NO: 452, SEQ ID NO: 456, SEQ ID NO: 458, SEQ ID NO: 460, SEQ ID NO: 468, SEQ ID NO: 470, SEQ ID NO: 472, SEQ ID NO: 480, SEQ ID NO: 484, SEQ ID NO: 492, SEQ ID NO: 494, SEQ ID NO: 496, SEQ ID NO: 498, SEQ ID NO: 500, SEQ ID NO: 502, SEQ ID NO: 504, SEQ ID NO: 506, SEQ ID NO: 510, SEQ ID NO: 512, SEQ ID NO: 514, SEQ ID NO: 522, SEQ ID NO: 524, SEQ ID NO: 526, SEQ ID NO: 534, SEQ ID NO: 538, SEQ ID NO: 546, SEQ ID NO: 548, SEQ ID NO: 550, SEQ ID NO: 552, SEQ ID NO: 554, SEQ ID NO: 556 and SEQ ID NO: 558.

[0096] The above-mentioned proteins SEQ ID NO: 6 and SEQ ID NO: 8 are new proteins corresponding to the mutated netrin 4.

[0097] The sequence SEQ ID NO: 2 comprises 628 amino acids and the sequences SEQ ID NO: 6 and SEQ ID NO: 8 comprise 637 amino acids. Thus, the proteins SEQ ID NO: 6 and SEQ ID NO: 8 contain an addition of 9 amino acids. These nine amino acid addition is the nine amino acids extension at the C-terminus defined above.

[0098] The mutated netrin 4, represented by the sequence SEQ ID NO: 6, corresponds to the netrin 4 protein represented by SEQ ID NO: 2 with the following 15 mutations:
[0099] replacement of cysteine in position 13 by arginine,
[0100] replacement of lysine in position 68 by threonine,
[0101] replacement of serine in position 183 by proline,
[0102] replacement of histidine in position 205 by tyrosine,
[0103] replacement of cysteine in position 234 by tyrosine,
[0104] replacement of alanine in position 331 by threonine,
[0105] replacement of cysteine in position 332 by arginine,
[0106] replacement of asparagine in position 353 by serine,
[0107] replacement of cysteine in position 472 by tyrosine,
[0108] replacement of asparagine in position 515 by lysine,
[0109] replacement of valine in position 589 by alanine,
[0110] replacement of arginine in position 625 by glutamate,
[0111] replacement of glutamate in position 626 by serine,
[0112] replacement of cysteine in position 627 by alanine,
[0113] replacement of lysine in position 628 by serine, and

[0114] wherein 9 amino acids have been added at the end of the protein, said 9 amino acids corresponding to the following sequence:

[0115] G S E L G T K L T (SEQ ID NO: 559)

[0116] The mutated netrin 4, represented by the sequence SEQ ID NO: 8, corresponds to the netrin 4 protein represented by SEQ ID NO: 2 with the following 14 mutations:
[0117] replacement of lysine in position 68 by threonine,
[0118] replacement of serine in position 183 by proline,
[0119] replacement of histidine in position 205 by tyrosine,
[0120] replacement of cysteine in position 234 by tyrosine,
[0121] replacement of alanine in position 331 by threonine,
[0122] replacement of cysteine in position 332 by arginine,
[0123] replacement of asparagine in position 353 by serine,
[0124] replacement of cysteine in position 472 by tyrosine,
[0125] replacement of asparagine in position 515 by lysine,
[0126] replacement of valine in position 589 by alanine,
[0127] replacement of arginine in position 625 by glutamate,
[0128] replacement of glutamate in position 626 by serine,
[0129] replacement of cysteine in position 627 by alanine,
[0130] replacement of lysine in position 628 by serine, and
[0131] and wherein the 9 amino acids defined above have been added at the end of the protein.

[0132] The above-mentioned sequences SEQ ID NO: 2q, q varying from 5 to 30 correspond to protein sequences, and thus are the following protein sequences: SEQ ID NO: 10, SEQ ID NO: 12, SEQ ID NO: 14, SEQ ID NO: 16, SEQ ID NO: 18, SEQ ID NO: 20, SEQ ID NO: 22, SEQ ID NO: 24, SEQ ID NO: 26, SEQ ID NO: 28, SEQ ID NO: 30, SEQ ID NO: 32, SEQ ID NO: 34, SEQ ID NO: 36, SEQ ID NO: 38, SEQ ID NO: 40, SEQ ID NO: 42, SEQ ID NO: 44, SEQ ID NO: 46, SEQ ID NO: 48, SEQ ID NO: 50, SEQ ID NO: 52, SEQ ID NO: 54, SEQ ID NO: 56, SEQ ID NO: 58 and SEQ ID NO: 60.

[0133] These mutated proteins are derived from the mutated netrin 4 represented by SEQ ID NO: 4, said SEQ ID NO: 4 corresponding to the mutated netrin 4 SEQ ID NO: 6 wherein all the contiguous amino acids after the 628^{th} amino acid have been deleted. Therefore proteins deriving from SEQ ID NO: 4 are 628 amino acid long.

[0134] The proteins having the SEQ ID NO: 2q, q varying from 5 to 19, defined above, have the following mutations:
[0135] The SEQ ID NO: 10 corresponds to SEQ ID NO: 4, wherein threonine in position 331 is replaced by alanine,
[0136] The SEQ ID NO: 12 corresponds to SEQ ID NO: 4, wherein arginine in position 332 is replaced by cysteine,
[0137] The SEQ ID NO: 14 corresponds to SEQ ID NO: 4, wherein serine in position 353 is replaced by asparagine,
[0138] The SEQ ID NO: 16 corresponds to SEQ ID NO: 4, wherein tyrosine in position 472 is replaced by cysteine,
[0139] The SEQ ID NO: 18 corresponds to SEQ ID NO: 4, wherein threonine in position 331 is replaced by alanine and wherein arginine in position 332 is replaced by cysteine,
[0140] The SEQ ID NO: 20 corresponds to SEQ ID NO: 4, wherein threonine in position 331 is replaced by alanine and wherein serine in position 353 is replaced by asparagine,
[0141] The SEQ ID NO: 22 corresponds to SEQ ID NO: 4, wherein threonine in position 331 is replaced by alanine and wherein tyrosine in position 472 is replaced by cysteine,
[0142] The SEQ ID NO: 24 corresponds to SEQ ID NO: 4, wherein arginine in position 332 is replaced by cysteine and wherein serine in position 353 is replaced by asparagine,
[0143] The SEQ ID NO: 26 corresponds to SEQ ID NO: 4, wherein arginine in position 332 is replaced by cysteine and wherein tyrosine in position 472 is replaced by cysteine,
[0144] The SEQ ID NO: 28 corresponds to SEQ ID NO: 4, wherein serine in position 353 is replaced by asparagine and wherein tyrosine in position 472 is replaced by cysteine,
[0145] The SEQ ID NO: 30 corresponds to SEQ ID NO: 4, wherein threonine in position 331 is replaced by alanine, wherein arginine in position 332 is replaced by cysteine and wherein serine in position 353 is replaced by asparagine,
[0146] The SEQ ID NO: 32 corresponds to SEQ ID NO: 4, wherein threonine in position 331 is replaced by alanine, wherein arginine in position 332 is replaced by cysteine and wherein tyrosine in position 472 is replaced by cysteine,
[0147] The SEQ ID NO: 34 corresponds to SEQ ID NO: 4, wherein threonine in position 331 is replaced by alanine, wherein serine in position 353 is replaced by asparagine and wherein tyrosine in position 472 is replaced by cysteine,
[0148] The SEQ ID NO: 36 corresponds to SEQ ID NO: 4, wherein arginine in position 332 is replaced by cysteine, wherein serine in position 353 is replaced by asparagine and wherein tyrosine in position 472 is replaced by cysteine,
[0149] The SEQ ID NO: 38 corresponds to SEQ ID NO: 4, wherein threonine in position 331 is replaced by alanine, wherein arginine in position 332 is replaced by cysteine, wherein serine in position 353 is replaced by asparagine and wherein tyrosine in position 472 is replaced by cysteine.

[0150] The proteins having the SEQ ID NO: 2q, q varying from 20 to 30, defined above, have a supplemental mutation in position 13, such that arginine in position 13 is replaced by cysteine.

[0151] Therefore, the mutated netrin 4, represented by the sequence SEQ ID NO: 40, corresponds to the mutated netrin 4 protein represented by SEQ ID NO: 14 with the replacement of tyrosine in position 472 by cysteine, the mutated netrin 4, represented by the sequence SEQ ID NO: 42, corresponds to the mutated netrin 4 protein represented by SEQ ID NO: 20 with the replacement of tyrosine in position 472 by cysteine, the mutated netrin 4, represented by the sequence SEQ ID NO: 44, corresponds to the mutated netrin 4 protein represented by SEQ ID NO: 22 with the replacement of tyrosine in position 472 by cysteine, the mutated netrin 4, represented by the sequence SEQ ID NO: 46, corresponds to the mutated netrin 4 protein represented by SEQ ID NO: 24 with the replacement of tyrosine in position 472 by cysteine, the mutated netrin 4, represented by the sequence SEQ ID NO: 48, corresponds to the mutated netrin 4 protein represented by SEQ ID NO: 26 with the replacement of tyrosine in position 472 by cysteine, the mutated netrin 4, represented by the sequence SEQ ID NO: 50, corresponds to the mutated netrin 4 protein represented by SEQ ID NO: 28 with the replacement of tyrosine in position 472 by cysteine, the mutated netrin 4, represented by the sequence SEQ ID NO: 52, corresponds to the mutated netrin 4 protein represented by SEQ ID NO: 30 with the replacement of tyrosine in position 472 by cysteine, the mutated netrin 4, represented by the sequence SEQ ID NO: 54, corresponds to the mutated netrin 4 protein represented by SEQ ID NO: 32 with the replacement of tyrosine in position 472 by cysteine, the mutated netrin 4, represented by the sequence SEQ ID NO: 56, corresponds to the mutated netrin 4 protein represented by SEQ ID NO: 34 with the replacement of tyrosine in position 472 by cysteine, the mutated netrin 4, represented by the sequence SEQ ID NO: 58, corresponds to the mutated netrin 4 protein represented by SEQ ID NO: 36 with the replacement of tyrosine in position 472 by cysteine and the mutated netrin 4, represented by the sequence SEQ ID NO: 60, corresponds to the mutated netrin 4 protein represented by SEQ ID NO: 38 with the replacement of tyrosine in position 472 by cysteine.

[0152] The above-mentioned sequences SEQ ID NO: 2q, q varying from 31 to 39 correspond to protein sequences SEQ ID NO: 62, SEQ ID NO: 64, SEQ ID NO: 66, SEQ ID NO: 68, SEQ ID NO: 70, SEQ ID NO: 72, SEQ ID NO: 74, SEQ ID NO: 76 and SEQ ID NO: 78.

[0153] These mutated proteins are derived from the wild type netrin 4 represented by SEQ ID NO: 2, and have the following mutations:
[0154] the mutated netrin 4 represented by sequence SEQ ID NO: 62 has a replacement of alanine in position 331 by threonine,
[0155] the mutated netrin 4 represented by sequence SEQ ID NO: 64 has a replacement of cysteine in position 332 by arginine,
[0156] the mutated netrin 4 represented by sequence SEQ ID NO: 66 has a replacement of alanine in position 331 by threonine and a replacement of cysteine in position 332 by arginine,
[0157] the mutated netrin 4 represented by sequence SEQ ID NO: 68 has a replacement of alanine in position 331 by threonine and a replacement of asparagine in position 353 by serine,
[0158] the mutated netrin 4 represented by sequence SEQ ID NO: 70 has a replacement of alanine in position 331 by threonine and a replacement of cysteine in position 472 by tyrosine,
[0159] the mutated netrin 4 represented by sequence SEQ ID NO: 72 has a replacement of alanine in position 331 by threonine, a replacement of cysteine in position 332 by arginine and a replacement of asparagine in position 353 by serine,
[0160] the mutated netrin 4 represented by sequence SEQ ID NO: 74 has a replacement of alanine in position 331 by threonine, a replacement of cysteine in position 332 by arginine and a replacement of cysteine in position 472 by tyrosine,
[0161] the mutated netrin 4 represented by sequence SEQ ID NO: 76 has a replacement of alanine in position 331 by threonine, a replacement of asparagine in position 353 by serine and a replacement of cysteine in position 472 by tyrosine, and
[0162] the mutated netrin 4 represented by sequence SEQ ID NO: 78 has a replacement of alanine in position 331 by threonine, a replacement of cysteine in position 332 by arginine, a replacement of asparagine in position 353 by serine and a replacement of cysteine in position 472 by tyrosine.

[0163] The following table 1 recapitulates the mutations in the mutated netrin 4 of the invention.

| Protein sequence | 13 | 68 | 183 | 205 | 234 | 331 | 332 | 353 | 472 | 515 | 589 | 625 | 626 | 627 | 628 | +X aa |
|---|---|---|---|---|---|---|---|---|---|---|---|---|---|---|---|---|
| SEQ ID NO: 2 | C | K | S | H | C | A | C | N | C | N | V | R | E | C | K | — |
| SEQ ID NO: 4 | R | T | P | Y | Y | T | R | S | Y | K | A | E | S | A | S | — |
| SEQ ID NO: 6 | R | T | P | Y | Y | T | R | S | Y | K | A | E | S | A | S | +9 |
| SEQ ID NO: 8 | C | T | P | Y | Y | T | R | S | Y | K | A | E | S | A | S | +9 |
| SEQ ID NO: 10 | R | T | P | Y | Y | A | R | S | Y | K | A | E | S | A | S | — |
| SEQ ID NO: 12 | R | T | P | Y | Y | T | C | S | Y | K | A | E | S | A | S | — |
| SEQ ID NO: 14 | R | T | P | Y | Y | T | R | N | Y | K | A | E | S | A | S | — |
| SEQ ID NO: 16 | R | T | P | Y | Y | T | R | S | C | K | A | E | S | A | S | — |
| SEQ ID NO: 18 | R | T | P | Y | Y | A | C | S | Y | K | A | E | S | A | S | — |
| SEQ ID NO: 20 | R | T | P | Y | Y | A | R | N | Y | K | A | E | S | A | S | — |
| SEQ ID NO: 22 | R | T | P | Y | Y | A | R | S | C | K | A | E | S | A | S | — |
| SEQ ID NO: 24 | R | T | P | Y | Y | T | C | N | Y | K | A | E | S | A | S | — |
| SEQ ID NO: 26 | R | T | P | Y | Y | T | C | S | C | K | A | E | S | A | S | — |
| SEQ ID NO: 28 | R | T | P | Y | Y | T | R | N | C | K | A | E | S | A | S | — |
| SEQ ID NO: 30 | R | T | P | Y | Y | A | C | N | Y | K | A | E | S | A | S | — |
| SEQ ID NO: 32 | R | T | P | Y | Y | A | C | S | C | K | A | E | S | A | S | — |
| SEQ ID NO: 34 | R | T | P | Y | Y | A | R | N | C | K | A | E | S | A | S | — |
| SEQ ID NO: 36 | R | T | P | Y | Y | T | C | N | C | K | A | E | S | A | S | — |
| SEQ ID NO: 38 | R | T | P | Y | Y | A | C | N | C | K | A | E | S | A | S | — |
| SEQ ID NO: 40 | C | T | P | Y | Y | T | R | N | Y | K | A | E | S | A | S | — |
| SEQ ID NO: 42 | C | T | P | Y | Y | A | R | N | Y | K | A | E | S | A | S | — |
| SEQ ID NO: 44 | C | T | P | Y | Y | A | R | S | C | K | A | E | S | A | S | — |
| SEQ ID NO: 46 | C | T | P | Y | Y | T | C | N | Y | K | A | E | S | A | S | — |
| SEQ ID NO: 48 | C | T | P | Y | Y | T | C | S | C | K | A | E | S | A | S | — |
| SEQ ID NO: 50 | C | T | P | Y | Y | T | R | N | C | K | A | E | S | A | S | — |
| SEQ ID NO: 52 | C | T | P | Y | Y | A | C | N | Y | K | A | E | S | A | S | — |
| SEQ ID NO: 54 | C | T | P | Y | Y | A | C | S | C | K | A | E | S | A | S | — |
| SEQ ID NO: 56 | C | T | P | Y | Y | A | R | N | C | K | A | E | S | A | S | — |
| SEQ ID NO: 58 | C | T | P | Y | Y | T | C | N | C | K | A | E | S | A | S | — |
| SEQ ID NO: 60 | C | T | P | Y | Y | A | C | N | C | K | A | E | S | A | S | — |
| SEQ ID NO: 62 | C | K | S | H | C | T | C | N | C | N | V | R | E | C | K | — |
| SEQ ID NO: 64 | C | K | S | H | C | A | R | N | C | N | V | R | E | C | K | — |
| SEQ ID NO: 66 | C | K | S | H | C | T | R | N | C | N | V | R | E | C | K | — |
| SEQ ID NO: 68 | C | K | S | H | C | T | C | S | C | N | V | R | E | C | K | — |
| SEQ ID NO: 70 | C | K | S | H | C | T | C | N | Y | N | V | R | E | C | K | — |
| SEQ ID NO: 72 | C | K | S | H | C | T | R | S | C | N | V | R | E | C | K | — |
| SEQ ID NO: 74 | C | K | S | H | C | T | R | N | Y | N | V | R | E | C | K | — |
| SEQ ID NO: 76 | C | K | S | H | C | T | C | S | Y | N | V | R | E | C | K | — |
| SEQ ID NO: 78 | C | K | S | H | C | T | R | S | Y | N | V | R | E | C | K | — |

[0164] The truncated proteins derived from the mutated netrin 4 proteins defined above have sequences SEQ ID NO: 2q, q varying from 40 to 93, from 95 to 98, from 100 to 123, from 126 to 132, from 134 to 136, from 138 to 159, from 161 to 163, from 165 to 216 and from 219 to 279, correspond to the following sequences: SEQ ID NO: 80, SEQ ID NO: 82, SEQ ID NO: 84, SEQ ID NO: 86, SEQ ID NO: 88, SEQ ID NO: 90, SEQ ID NO: 92, SEQ ID NO: 94, SEQ ID NO: 96, SEQ ID NO: 98, SEQ ID NO: 100, SEQ ID NO: 102, SEQ ID NO: 104, SEQ ID NO: 106, SEQ ID NO: 108, SEQ ID NO: 110, SEQ ID NO: 112, SEQ ID NO: 114, SEQ ID NO: 116, SEQ ID NO: 118, SEQ ID NO: 120, SEQ ID NO: 122, SEQ ID NO: 124, SEQ ID NO: 126, SEQ ID NO: 128, SEQ ID NO: 130, SEQ ID NO: 132, SEQ ID NO: 134, SEQ ID NO: 136, SEQ ID NO: 138, SEQ ID NO: 140, SEQ ID NO: 142, SEQ ID NO: 144, SEQ ID NO: 146, SEQ ID NO: 148, SEQ ID NO: 150, SEQ ID NO: 152, SEQ ID NO: 154, SEQ ID NO: 156, SEQ ID NO: 158, SEQ ID NO: 160, SEQ ID NO: 162, SEQ ID NO: 164, SEQ ID NO: 166, SEQ ID NO: 168, SEQ ID NO: 170, SEQ ID NO: 172, SEQ ID NO: 174, SEQ ID NO: 176, SEQ ID NO: 178, SEQ ID NO: 180, SEQ ID NO: 182, SEQ ID NO: 184, SEQ ID NO: 186, SEQ ID NO: 190, SEQ ID NO: 192, SEQ ID NO: 194, SEQ ID NO: 196, SEQ ID NO: 200, SEQ ID NO: 202, SEQ ID NO: 204, SEQ ID NO: 206, SEQ ID NO: 208, SEQ ID NO: 210, SEQ ID NO: 212, SEQ ID NO: 214, SEQ ID NO: 216, SEQ ID NO: 218, SEQ ID NO: 220, SEQ ID NO: 222, SEQ ID NO: 224, SEQ ID NO: 226, SEQ ID NO: 228, SEQ ID NO: 230, SEQ ID NO: 232, SEQ ID NO: 234, SEQ ID NO: 236, SEQ ID NO: 238, SEQ ID NO: 240, SEQ ID NO: 242, SEQ ID NO: 244, SEQ ID NO: 246, SEQ ID NO: 252, SEQ ID NO: 254, SEQ ID NO: 256, SEQ ID NO: 258, SEQ ID NO: 260, SEQ ID NO: 262, SEQ ID NO: 264, SEQ ID NO: 268, SEQ ID NO: 270, SEQ ID NO: 272, SEQ ID NO: 276, SEQ ID NO: 278, SEQ ID NO: 280, SEQ ID NO: 282, SEQ ID NO: 284, SEQ ID NO: 286, SEQ ID NO: 288, SEQ ID NO: 290, SEQ ID NO: 292, SEQ ID NO: 294, SEQ ID NO: 296, SEQ ID NO: 298, SEQ ID NO: 300, SEQ ID NO: 302, SEQ ID NO: 304, SEQ ID NO: 306, SEQ ID NO: 308, SEQ ID NO: 310, SEQ ID NO: 312, SEQ ID NO: 314, SEQ ID NO: 316, SEQ ID NO: 318, SEQ ID NO: 322, SEQ ID NO: 324, SEQ ID NO: 326, SEQ ID NO: 330, SEQ ID NO: 332, SEQ ID NO: 334, SEQ ID NO: 336, SEQ ID NO: 338, SEQ ID NO: 340, SEQ ID NO: 342, SEQ ID NO: 344, SEQ ID NO: 346, SEQ ID NO: 348, SEQ ID NO: 350, SEQ ID NO: 352, SEQ ID NO: 354, SEQ ID NO: 356, SEQ ID NO: 358, SEQ ID NO: 360, SEQ ID NO: 362, SEQ ID NO: 364, SEQ ID NO: 366, SEQ ID NO: 368, SEQ ID NO: 370, SEQ ID NO: 372, SEQ ID NO: 374, SEQ ID NO: 376, SEQ ID NO: 378, SEQ ID NO: 380, SEQ ID NO: 382, SEQ ID NO: 384, SEQ ID NO: 386, SEQ ID NO: 388, SEQ ID NO: 390, SEQ ID NO: 392, SEQ ID NO: 394, SEQ ID NO: 396, SEQ ID NO: 398, SEQ ID NO: 400, SEQ ID NO: 402, SEQ ID NO: 404, SEQ ID NO: 406, SEQ ID NO: 408, SEQ ID NO: 410, SEQ ID NO: 412, SEQ ID NO: 414, SEQ ID NO: 416, SEQ ID NO: 418, SEQ ID NO: 420, SEQ ID NO: 422, SEQ ID NO: 424, SEQ ID NO: 426, SEQ ID NO: 428, SEQ ID NO: 430, SEQ ID NO: 432, SEQ ID NO: 438, SEQ ID NO: 440, SEQ ID NO: 442, SEQ ID NO: 444, SEQ ID NO: 446, SEQ ID NO: 448, SEQ ID NO: 450, SEQ ID NO: 452, SEQ ID NO: 454, SEQ ID NO: 456, SEQ ID NO: 458, SEQ ID NO: 460, SEQ ID NO: 462, SEQ ID NO: 464, SEQ ID NO: 466, SEQ ID NO: 468, SEQ ID NO: 470, SEQ ID NO: 472, SEQ ID NO: 474, SEQ ID NO: 476, SEQ ID NO: 478, SEQ ID NO: 480, SEQ ID NO: 482, SEQ ID NO: 484, SEQ ID NO: 486, SEQ ID NO: 488, SEQ ID NO: 490, SEQ ID NO: 492, SEQ ID NO: 494, SEQ ID NO: 496, SEQ ID NO: 498, SEQ ID NO: 500, SEQ ID NO: 502, SEQ ID NO: 504, SEQ ID NO: 506, SEQ ID NO: 508, SEQ ID NO: 510, SEQ ID NO: 512, SEQ ID NO: 514, SEQ ID NO: 516, SEQ ID NO: 518, SEQ ID NO: 520, SEQ ID NO: 522, SEQ ID NO: 524, SEQ ID NO: 526, SEQ ID NO: 528, SEQ ID NO: 530, SEQ ID NO: 532, SEQ ID NO: 534, SEQ ID NO: 536, SEQ ID NO: 538, SEQ ID NO: 540, SEQ ID NO: 542, SEQ ID NO: 544, SEQ ID NO: 546, SEQ ID NO: 548, SEQ ID NO: 550, SEQ ID NO: 552, SEQ ID NO: 554, SEQ ID NO: 556 and SEQ ID NO: 558.

[0165] For instance, the above truncated proteins are defined such that:
[0166] the truncated mutated netrin 4, represented by SEQ ID NO: 80, is derived from mutated netrin 4 represented by SEQ ID NO: 6, wherein the 19 first amino acids have been deleted,
[0167] the truncated mutated netrin 4, represented by SEQ ID NO: 130, is derived from mutated netrin 4 represented by SEQ ID NO: 6, wherein the 31 first amino acids have been deleted.

[0168] Also, the truncated proteins are, for instance, defined such that:
[0169] the truncated proteins netrin 4, represented by SEQ ID NO: 180, is derived from mutated netrin 4 represented by SEQ ID NO: 6, wherein the last 122 amino acids have been deleted, i.e. the truncated proteins netrin 4, represented by SEQ ID NO: 180 is delimited by the positions 1 to 515.
[0170] the truncated proteins netrin 4, represented by SEQ ID NO: 182, is derived from mutated netrin 4 represented by SEQ ID NO: 8, wherein the last 122 amino acids have been deleted, i.e. the truncated proteins netrin 4, represented by SEQ ID NO: 182 is delimited by the positions 1 to 515.
[0171] the truncated protein netrin 4, represented by SEQ ID NO: 354, is derived from mutated netrin 4 represented by SEQ ID NO: 6, wherein the last 160 amino acids have been deleted, i.e. the truncated protein netrin 4, represented by SEQ ID NO: 354 is delimited by the positions 1 to 477.
[0172] the truncated protein netrin 4, represented by SEQ ID NO: 356, is derived from mutated netrin 4 represented by SEQ ID NO: 8, wherein the last 160 amino acids have been deleted, i.e. the truncated protein netrin 4, represented by SEQ ID NO: 356 is delimited by the positions 1 to 477.

[0173] Moreover,
[0174] the truncated protein netrin 4, represented by SEQ ID NO: 254, is derived from mutated netrin 4 represented by SEQ ID NO: 180, wherein the 19 first amino acids have been deleted,
[0175] the truncated protein netrin 4, represented by SEQ ID NO: 304, is derived from mutated netrin 4 represented by SEQ ID NO: 180, wherein the 31 first amino acids have been deleted,
[0176] the truncated protein netrin 4, represented by SEQ ID NO: 428, is derived from mutated netrin 4 represented by SEQ ID NO: 354, wherein the 19 first amino acids have been deleted,
[0177] the truncated protein netrin 4, represented by SEQ ID NO: 478, is derived from mutated netrin 4 represented by SEQ ID NO: 354, wherein the 31 first amino acids have been deleted.

[0178] Also, some proteins, disclosed in the present invention, have no correspondence with the non-truncated protein. These sequences are:
[0179] SEQ ID NO: 116, which derives from SEQ ID NO: 2 wherein the asparagine in position 353 has been replaced by serine, and wherein the 20 first amino acids have been deleted,
[0180] SEQ ID NO: 118, which derives from SEQ ID NO: 2 wherein the cysteine in position 472 has been replaced by tyrosine, and wherein the 20 first amino acids have been deleted,
[0181] SEQ ID NO: 170, which derives from SEQ ID NO: 2 wherein the asparagine in position 353 has been replaced by serine, and wherein the 32 first amino acids have been deleted,
[0182] SEQ ID NO: 172, which derives from SEQ ID NO: 2 wherein the cysteine in position 472 has been replaced by tyrosine, and wherein the 32 first amino acids have been deleted,
[0183] SEQ ID NO: 248, which derives from SEQ ID NO: 2 wherein the asparagine in position 353 has been replaced by serine, and wherein the last 122 amino acids have been deleted as defined above,
[0184] SEQ ID NO: 250 which derives from SEQ ID NO: 2 wherein the cysteine in position 472 has been replaced by tyrosine, and wherein the last 122 amino acids have been deleted as defined above,
[0185] SEQ ID NO: 302, which derives from SEQ ID NO: 2 wherein the asparagine in position 353 has been replaced by serine, wherein the 20 first amino acids have been deleted, and wherein the last 122 amino acids have been deleted as defined above,
[0186] SEQ ID NO: 304 which derives from SEQ ID NO: 2 wherein the cysteine in position 472 has been replaced by tyrosine, wherein the 20 first amino acids have been deleted, and wherein the last 122 amino acids have been deleted as defined above,
[0187] SEQ ID NO: 356, which derives from SEQ ID NO: 2 wherein the asparagine in position 353 has been replaced by serine, wherein the 32 first amino acids have been deleted, and wherein the last 122 amino acids have been deleted as defined above,
[0188] SEQ ID NO: 358 which derives from SEQ ID NO: 2 wherein the cysteine in position 472 has been replaced by tyrosine, wherein the 32 first amino acids have been deleted, and wherein the last 122 amino acids have been deleted as defined above,
[0189] SEQ ID NO: 434, which derives from SEQ ID NO: 2 wherein the asparagine in position 353 has been replaced by serine, and wherein the last 160 amino acids have been deleted as defined above,
[0190] SEQ ID NO: 436 which derives from SEQ ID NO: 2 wherein the cysteine in position 472 has been replaced by tyrosine, and wherein the last 160 amino acids have been deleted as defined above,
[0191] SEQ ID NO: 488, which derives from SEQ ID NO: 2 wherein the asparagine in position 353 has been replaced by serine, wherein the 20 first amino acids have been deleted, and wherein the last 160 amino acids have been deleted as defined above,
[0192] SEQ ID NO: 490 which derives from SEQ ID NO: 2 wherein the cysteine in position 472 has been replaced by tyrosine, wherein the 20 first amino acids have been deleted, and wherein the last 160 amino acids have been deleted as defined above,
[0193] SEQ ID NO: 542, which derives from SEQ ID NO: 2 wherein the asparagine in position 353 has been replaced by serine, wherein the 32 first amino acids have been deleted, and wherein the last 160 amino acids have been deleted as defined above,
[0194] SEQ ID NO: 544 which derives from SEQ ID NO: 2 wherein the cysteine in position 472 has been replaced by tyrosine, wherein the 32 first amino acids have been deleted, and wherein the last 160 amino acids have been deleted as defined above,

[0195] The following table 2 recapitulates the correspondence between mutated proteins and the derived truncated proteins.

[0196] Truncated N20 means that the 19 first contiguous amino acids have been deleted.

[0197] Truncated N32 means that the 31 first contiguous amino acids have been deleted.

[0198] Truncated C515 means that all the amino acids after the position 515 have been deleted.

[0199] Truncated C477 means that all the amino acids after the position 477 have been deleted.

[0200] Truncated N20 C515 means that the 19 first amino acids have been deleted and that the amino acids after the position 515 have been deleted.

[0201] Truncated N32 C515 means that the 31 first amino acids have been deleted and that the amino acids after the position 515 have been deleted.

[0202] Truncated N20 C477 means that the 19 first amino acids have been deleted and that the amino acids after the position 477 have been deleted.

[0203] Truncated N32 C477 means that the 31 first amino acids have been deleted and that the amino acids after the position 477 have been deleted.

| | Truncated | Truncated | Truncated | Truncated |
|---|---|---|---|---|
| Mutated Protein | N20 | N32 | C515 | N20 C515 |
| SEQ ID NO: 2 | — | — | — | — |
| SEQ ID NO: 4 | — | — | — | — |
| SEQ ID NO: 6 | SEQ ID NO: 80 | SEQ ID NO: 134 | SEQ ID NO: 188* | SEQ ID NO: 266* |
| SEQ ID NO: 8 | — | — | SEQ ID NO: 190 | — |
| SEQ ID NO: 10 | SEQ ID NO: 82 | SEQ ID NO: 136 | SEQ ID NO: 192 | SEQ ID NO: 268 |
| SEQ ID NO: 12 | SEQ ID NO: 84 | SEQ ID NO: 138 | SEQ ID NO: 194 | SEQ ID NO: 270 |
| SEQ ID NO: 14 | SEQ ID NO: 86 | SEQ ID NO: 140 | SEQ ID NO: 196 | SEQ ID NO: 272 |
| SEQ ID NO: 16 | SEQ ID NO: 88 | SEQ ID NO: 142 | SEQ ID NO: 198* | SEQ ID NO: 274* |
| SEQ ID NO: 18 | SEQ ID NO: 90 | SEQ ID NO: 144 | SEQ ID NO: 200 | SEQ ID NO: 276 |
| SEQ ID NO: 20 | SEQ ID NO: 92 | SEQ ID NO: 146 | SEQ ID NO: 202 | SEQ ID NO: 278 |
| SEQ ID NO: 22 | SEQ ID NO: 94 | SEQ ID NO: 148 | SEQ ID NO: 204 | SEQ ID NO: 280 |
| SEQ ID NO: 24 | SEQ ID NO: 96 | SEQ ID NO: 150 | SEQ ID NO: 206 | SEQ ID NO: 282 |
| SEQ ID NO: 26 | SEQ ID NO: 98 | SEQ ID NO: 152 | SEQ ID NO: 208 | SEQ ID NO: 284 |
| SEQ ID NO: 28 | SEQ ID NO: 100 | SEQ ID NO: 154 | SEQ ID NO: 210 | SEQ ID NO: 286 |
| SEQ ID NO: 30 | SEQ ID NO: 102 | SEQ ID NO: 156 | SEQ ID NO: 212 | SEQ ID NO: 288 |
| SEQ ID NO: 32 | SEQ ID NO: 104 | SEQ ID NO: 158 | SEQ ID NO: 214 | SEQ ID NO: 290 |
| SEQ ID NO: 34 | SEQ ID NO: 106 | SEQ ID NO: 160 | SEQ ID NO: 216 | SEQ ID NO: 292 |
| SEQ ID NO: 36 | SEQ ID NO: 108 | SEQ ID NO: 162 | SEQ ID NO: 218 | SEQ ID NO: 294 |
| SEQ ID NO: 38 | SEQ ID NO: 110 | SEQ ID NO: 164 | SEQ ID NO: 220 | SEQ ID NO: 296 |
| SEQ ID NO: 40 | — | — | SEQ ID NO: 222 | — |
| SEQ ID NO: 42 | — | — | SEQ ID NO: 224 | — |
| SEQ ID NO: 44 | — | — | SEQ ID NO: 226 | — |
| SEQ ID NO: 46 | — | — | SEQ ID NO: 228 | — |
| SEQ ID NO: 48 | — | — | SEQ ID NO: 230 | — |
| SEQ ID NO: 50 | — | — | SEQ ID NO: 232 | — |
| SEQ ID NO: 52 | — | — | SEQ ID NO: 234 | — |
| SEQ ID NO: 54 | — | — | SEQ ID NO: 236 | — |
| SEQ ID NO: 56 | — | — | SEQ ID NO: 238 | — |
| SEQ ID NO: 58 | — | — | SEQ ID NO: 240 | — |
| SEQ ID NO: 60 | — | — | SEQ ID NO: 242 | — |
| SEQ ID NO: 62 | SEQ ID NO: 112 | SEQ ID NO: 166 | SEQ ID NO: 244 | SEQ ID NO: 298 |
| SEQ ID NO: 64 | SEQ ID NO: 114 | SEQ ID NO: 168 | SEQ ID NO: 246 | SEQ ID NO: 300 |
| — | SEQ ID NO: 116 | SEQ ID NO: 170 | SEQ ID NO: 248 | SEQ ID NO: 302 |
| — | SEQ ID NO: 118 | SEQ ID NO: 172 | SEQ ID NO: 250 | SEQ ID NO: 304 |
| SEQ ID NO: 66 | SEQ ID NO: 120 | SEQ ID NO: 174 | SEQ ID NO: 252 | SEQ ID NO: 306 |
| SEQ ID NO: 68 | SEQ ID NO: 122 | SEQ ID NO: 176 | SEQ ID NO: 254 | SEQ ID NO: 308 |
| SEQ ID NO: 70 | SEQ ID NO: 124 | SEQ ID NO: 178 | SEQ ID NO: 256 | SEQ ID NO: 310 |
| SEQ ID NO: 72 | SEQ ID NO: 126 | SEQ ID NO: 180 | SEQ ID NO: 258 | SEQ ID NO: 312 |
| SEQ ID NO: 74 | SEQ ID NO: 128 | SEQ ID NO: 182 | SEQ ID NO: 260 | SEQ ID NO: 314 |
| SEQ ID NO: 76 | SEQ ID NO: 130 | SEQ ID NO: 184 | SEQ ID NO: 262 | SEQ ID NO: 316 |
| SEQ ID NO: 78 | SEQ ID NO: 132 | SEQ ID NO: 186 | SEQ ID NO: 264 | SEQ ID NO: 318 |

| Truncated | Truncated | Truncated | Truncated |
|---|---|---|---|
| N32 C515 | C477 | N20 C477 | N32 C477 |
| — | — | — | — |
| — | — | — | — |
| SEQ ID NO: 320* | SEQ ID NO: 374 | SEQ ID NO: 452 | SEQ ID NO: 506 |
| — | SEQ ID NO: 376 | — | — |
| SEQ ID NO: 322 | SEQ ID NO: 378 | SEQ ID NO: 454 | SEQ ID NO: 508 |
| SEQ ID NO: 324 | SEQ ID NO: 380 | SEQ ID NO: 456 | SEQ ID NO: 510 |
| SEQ ID NO: 326 | SEQ ID NO: 382 | SEQ ID NO: 458 | SEQ ID NO: 512 |
| SEQ ID NO: 328* | SEQ ID NO: 384 | SEQ ID NO: 460 | SEQ ID NO: 514 |
| SEQ ID NO: 330 | SEQ ID NO: 386 | SEQ ID NO: 462 | SEQ ID NO: 516 |
| SEQ ID NO: 332 | SEQ ID NO: 388 | SEQ ID NO: 464 | SEQ ID NO: 518 |
| SEQ ID NO: 334 | SEQ ID NO: 390 | SEQ ID NO: 466 | SEQ ID NO: 520 |
| SEQ ID NO: 336 | SEQ ID NO: 392 | SEQ ID NO: 468 | SEQ ID NO: 522 |
| SEQ ID NO: 338 | SEQ ID NO: 394 | SEQ ID NO: 470 | SEQ ID NO: 524 |
| SEQ ID NO: 340 | SEQ ID NO: 396 | SEQ ID NO: 472 | SEQ ID NO: 526 |
| SEQ ID NO: 342 | SEQ ID NO: 398 | SEQ ID NO: 474 | SEQ ID NO: 528 |
| SEQ ID NO: 344 | SEQ ID NO: 400 | SEQ ID NO: 476 | SEQ ID NO: 530 |
| SEQ ID NO: 346 | SEQ ID NO: 402 | SEQ ID NO: 478 | SEQ ID NO: 532 |
| SEQ ID NO: 348 | SEQ ID NO: 404 | SEQ ID NO: 480 | SEQ ID NO: 534 |
| SEQ ID NO: 350 | SEQ ID NO: 406 | SEQ ID NO: 482 | SEQ ID NO: 536 |
| — | SEQ ID NO: 408 | — | — |
| — | SEQ ID NO: 410 | — | — |
| — | SEQ ID NO: 412 | — | — |
| — | SEQ ID NO: 414 | — | — |
| — | SEQ ID NO: 416 | — | — |
| — | SEQ ID NO: 418 | — | — |
| — | SEQ ID NO: 420 | — | — |
| — | SEQ ID NO: 422 | — | — |
| — | SEQ ID NO: 424 | — | — |
| — | SEQ ID NO: 426 | — | — |
| — | SEQ ID NO: 428 | — | — |
| SEQ ID NO: 352 | SEQ ID NO: 430 | SEQ ID NO: 484 | SEQ ID NO: 538 |
| SEQ ID NO: 354 | SEQ ID NO: 432 | SEQ ID NO: 486 | SEQ ID NO: 540 |
| SEQ ID NO: 356 | SEQ ID NO: 434 | SEQ ID NO: 488 | SEQ ID NO: 542 |
| SEQ ID NO: 358 | SEQ ID NO: 436 | SEQ ID NO: 490 | SEQ ID NO: 544 |
| SEQ ID NO: 360 | SEQ ID NO: 438 | SEQ ID NO: 492 | SEQ ID NO: 546 |
| SEQ ID NO: 362 | SEQ ID NO: 440 | SEQ ID NO: 494 | SEQ ID NO: 548 |
| SEQ ID NO: 364 | SEQ ID NO: 442 | SEQ ID NO: 496 | SEQ ID NO: 550 |
| SEQ ID NO: 366 | SEQ ID NO: 444 | SEQ ID NO: 498 | SEQ ID NO: 552 |
| SEQ ID NO: 368 | SEQ ID NO: 446 | SEQ ID NO: 500 | SEQ ID NO: 554 |
| SEQ ID NO: 370 | SEQ ID NO: 448 | SEQ ID NO: 502 | SEQ ID NO: 556 |
| SEQ ID NO: 372 | SEQ ID NO: 450 | SEQ ID NO: 504 | SEQ ID NO: 558 |

[0204] The mutated netrin 4 of the invention and the truncated proteins thereof have an activity of inhibition of the angiogenesis.

[0205] The activity of inhibition of the angiogenesis is also called anti-angiogenic activity. This activity can for example be detected in vitro by showing the inhibition of the proliferation, as well as the migration, and the differentiation, of endothelial cells by the above-mentioned mutated proteins or truncated proteins thereof of the invention. Measurement of the inhibition of the endothelial cells proliferation can also be carried out by culturing endothelial cells in the presence of the protein or the truncated protein thereof, the activity of which is to be tested. Measurement of the inhibition of the endothelial cells migration can also be tested by carrying out a “wound” on a carpet of endothelial cells and by then incubating the cells in the presence of the truncated protein to be tested. The number of cells that migrated on the wound is then measured. Measurement of the inhibition of the sprouting (tubulogenesis) of the endothelial cells can be carried out by measuring the length of tubules formed by endothelial cells cultured on gel in the presence of the truncated protein to be tested.

[0206] Among the classical models for measuring the angiogenesis, the following one can be cited (models by local administration):
[0207] sub-cutaneous injection of Matrigel (Becton Dickinson) impregnated with the compound of the invention (Inoki I, Shiomi T, Hashimoto G, Enomoto H, Nakamura H, MakiNO K, Ikeda E, Takata S, Kobayashi K, Okada Y (2002) Connective tissue growth factor binds vascular endothelial growth factor (VEGF) and inhibits VEGF-induced angiogenesis. FASEB J. 16(2):219-21), or
[0208] application to chicken chorio-allantoid membrane of an implant containing a compound of the invention (Plouët J., Schilling J., Gospodarowicz D., EMBO J. 1989 Dec. 1; 8(12):3801-6).

[0209] Alternatively, the truncated proteins of the invention can be injected by systemic route (intravenous, intra-peritoneal, and subcutaneous route) to animals by which an experimental angiogenic disease was created. The truncated proteins of the invention can also be directly injected into a tumor. Alternatively, the fragments or the anti-idiotypic antibodies of the invention (described hereafter) can be administered by a gene therapy method by local or systemic route by any method allowing the expression of the fragments or of the anti-idiotypic antibodies of the invention. Alternatively, the fragments or the anti-idiotypic antibodies of the invention can be inserted into a plasmid which is transfected into cancer cells. All these measuring methods are in particular described in the article of Jain R K, Schlenger K, Hockel M, Yuan F (1997) Quantitative angiogenesis assays: progress and problems. Nat. Med. 3(11):1203-8.

[0210] The anti-tumoral activity designates an activity allowing the inhibition of tumor growth and/or the induction of the regression, and even the disappearance of tumors. For example, this activity can be detected in vivo by measuring the tumors mass, the development of which was induced in the mouse by the injection of tumor cells, in the presence and in the absence of the administration of peptide sequences of the invention and/or of nucleic acids that express the peptide sequences of the invention.

[0211] The mutated protein of the invention and the truncated proteins of the invention are also characterized in that they have a pericytes activation activity.

[0212] This activity of activating the pericytes is in particular checked by the proliferation and migration tests as mentioned hereafter and in particular in the experimental part.

[0213] The present invention is in particular based on the fact that the netrins bind to the UNC5H4 mouse receptors, UNC5D human receptors, DCC human receptors, UNC5B human receptor and Neogenin human receptors of pericytes and smooth muscle cells (SMC).

[0214] The present invention relates to a nucleotide sequence coding for a mutated protein or a truncated proteins thereof defined above.

[0215] In one particular embodiment, the present invention also relates to a nucleotide sequence coding for a mutated protein defined above, or a truncated protein thereof, in particular characterized in that it comprises or consists of one of the nucleotide sequence SEQ ID NO: 2q-1, q varying from 3 to 93, from 95 to 98, from 100 to 123, from 126 to 132, from 134 to 136, from 138 to 159, from 161 to 163, from 165 to 216 and from 219 to 279.

[0216] In one particular embodiment, the invention relates to a nucleotide sequence coding for
[0217] SEQ ID NO: 5 or SEQ ID NO: 7, or
[0218] a mutated protein defined above, consisting of: the sequence of netrin 4, represented by SEQ ID NO: 2, containing
   [0219] one or two or three or four mutations, said nucleotide sequence being characterized in that it consists of one of the following sequence SEQ ID NO: 2q-1, q varying from 31 to 39, or
   [0220] ten or eleven or twelve or thirteen or fourteen mutations, said nucleotide sequence being characterized in that it consists of one of the following sequence of SEQ ID NO: 2q-1, q varying from 5 to 30, or
[0221] a truncated mutated protein derived from said mutated protein defined above, said nucleotide sequence consisting of one of the sequences SEQ ID NO: 2q-1, q varying from 40 to 93, from 95 to 98, from 100 to 123, from 126 to 132, from 134 to 136, from 138 to 159, from 161 to 163, from 165 to 216 and from 219 to 279.
   In one advantageous embodiment, the invention relates to a nucleotide sequence coding for a mutated protein as defined above, in particular characterized in that it comprises or consists of one of the following sequences SEQ ID NO: 5, SEQ ID NO: 7, SEQ ID NO: 11, SEQ ID NO: 13, SEQ ID NO: 15, SEQ ID NO: 23, SEQ ID NO: 25, SEQ ID NO: 27, SEQ ID NO: 35, SEQ ID NO: 39, SEQ ID NO: 45, SEQ ID NO: 47, SEQ ID NO: 49, SEQ ID NO: 57, SEQ ID NO: 61, SEQ ID NO: 65, SEQ ID NO: 67, SEQ ID NO: 69, SEQ ID NO: 71, SEQ ID NO: 73, SEQ ID NO: 75, SEQ ID NO: 77, SEQ ID NO: 79, SEQ ID NO: 83, SEQ ID NO: 85, SEQ ID NO: 87, SEQ ID NO: 95, SEQ ID NO: 97, SEQ ID NO: 99, SEQ ID NO: 107, SEQ ID NO: 111, SEQ ID NO: 119, SEQ ID NO: 121, SEQ ID NO: 123, SEQ ID NO: 125, SEQ ID NO: 127, SEQ ID NO: 129, SEQ ID NO: 131, SEQ ID NO: 133, SEQ ID NO: 137, SEQ ID NO: 139, SEQ ID NO: 141, SEQ ID NO: 149, SEQ ID NO: 151, SEQ ID NO: 153, SEQ ID NO: 161, SEQ ID NO: 165, SEQ ID NO: 173, SEQ ID NO: 175, SEQ ID NO: 177, SEQ ID NO: 179, SEQ ID NO: 181, SEQ ID NO: 183, SEQ ID NO: 185, SEQ ID NO: 189, SEQ ID NO: 193, SEQ ID NO: 195, SEQ ID NO: 205, SEQ ID NO: 207, SEQ ID NO: 209, SEQ ID NO: 217, SEQ ID NO: 221, SEQ ID NO: 227, SEQ ID NO: 229, SEQ ID NO: 231, SEQ ID NO: 239, SEQ ID NO: 243, SEQ ID NO: 251, SEQ ID NO: 253, SEQ ID NO: 255, SEQ ID NO: 257, SEQ ID NO: 259, SEQ ID NO: 261, SEQ ID NO: 263, SEQ ID NO: 269, SEQ ID NO: 271, SEQ ID NO: 281, SEQ ID NO: 283, SEQ ID NO: 285, SEQ ID NO: 293, SEQ ID NO: 297, SEQ ID NO: 305, SEQ ID NO: 307, SEQ ID NO: 309, SEQ ID NO: 311, SEQ ID NO: 313, SEQ ID NO: 315, SEQ ID NO: 317, SEQ ID NO: 323, SEQ ID NO: 325, SEQ ID NO: 335, SEQ ID NO: 337, SEQ ID NO: 339, SEQ ID NO: 347, SEQ ID NO: 351, SEQ ID NO: 359, SEQ ID NO: 361, SEQ ID NO: 363, SEQ ID NO: 365, SEQ ID NO: 367, SEQ ID NO: 369, SEQ ID NO: 371, SEQ ID NO: 373, SEQ ID NO: 375, SEQ ID NO: 379, SEQ ID NO: 381, SEQ ID NO: 383, SEQ ID NO: 391, SEQ ID NO: 393, SEQ ID NO: 395, SEQ ID NO: 403, SEQ ID NO: 407, SEQ ID NO: 413, SEQ ID NO: 415, SEQ ID NO: 417, SEQ ID NO: 425, SEQ ID NO: 429, SEQ ID NO: 437, SEQ ID NO: 439, SEQ ID NO: 441, SEQ ID NO: 443, SEQ ID NO: 445, SEQ ID NO: 447, SEQ ID NO: 449, SEQ ID NO: 451, SEQ ID NO: 455, SEQ ID NO: 457, SEQ ID NO: 459, SEQ ID NO: 467, SEQ ID NO: 469, SEQ ID NO: 471, SEQ ID NO: 479, SEQ ID NO: 483, SEQ ID NO: 491, SEQ ID NO: 493, SEQ ID NO: 495, SEQ ID NO: 497, SEQ ID NO: 499, SEQ ID NO: 501, SEQ ID NO: 503, SEQ ID NO: 505, SEQ ID NO: 509, SEQ ID NO: 511, SEQ ID NO: 513, SEQ ID NO: 521, SEQ ID NO: 523, SEQ ID NO: 525, SEQ ID NO: 533, SEQ ID NO: 537, SEQ ID NO: 545, SEQ ID NO: 547, SEQ ID NO: 549, SEQ ID NO: 551, SEQ ID NO: 553, SEQ ID NO: 555 and SEQ ID NO: 557.

[0222] The above-mentioned sequences SEQ ID NO: 2q-1, q varying from 3 to 93, from 95 to 98, from 100 to 123, from 126 to 132, from 134 to 136, from 138 to 159, from 161 to 163, from 165 to 216 and from 219 to 279, code for the above-mentioned mutated proteins and truncated proteins of the mutated netrin 4, represented by SEQ ID NO: 2q, and they correspond to the following nucleotide sequences: SEQ ID NO: 5, SEQ ID NO: 7, SEQ ID NO: 9, SEQ ID NO: 11, SEQ ID NO: 13, SEQ ID NO: 15, SEQ ID NO: 17, SEQ ID NO: 19, SEQ ID NO: 21, SEQ ID NO: 23, SEQ ID NO: 25, SEQ ID NO: 27, SEQ ID NO: 29, SEQ ID NO: 31, SEQ ID NO: 33, SEQ ID NO: 35, SEQ ID NO: 37, SEQ ID NO: 39, SEQ ID NO: 41, SEQ ID NO: 43, SEQ ID NO: 45, SEQ ID NO: 47, SEQ ID NO: 49, SEQ ID NO: 51, SEQ ID NO: 53, SEQ ID NO: 55, SEQ ID NO: 57, SEQ ID NO: 59, SEQ ID NO: 61, SEQ ID NO: 63, SEQ ID NO: 65, SEQ ID NO: 67, SEQ ID NO: 69, SEQ ID NO: 71, SEQ ID NO: 73, SEQ ID NO: 75, SEQ ID NO: 77, SEQ ID NO: 79, SEQ ID NO: 81, SEQ ID NO: 83, SEQ ID NO: 85, SEQ ID NO: 87, SEQ ID NO: 89, SEQ ID NO: 91, SEQ ID NO: 93, SEQ ID NO: 95, SEQ ID NO: 97, SEQ ID NO: 99, SEQ ID NO: 101, SEQ ID NO: 103, SEQ ID NO: 105, SEQ ID NO: 107, SEQ ID NO: 109, SEQ ID NO: 111, SEQ ID NO: 113, SEQ ID NO: 115, SEQ ID NO: 117, SEQ ID NO: 119, SEQ ID NO: 121, SEQ ID NO: 123, SEQ ID NO: 125, SEQ ID NO: 127, SEQ ID NO: 129, SEQ ID NO: 131, SEQ ID NO: 133, SEQ ID NO: 135, SEQ ID NO: 137, SEQ ID NO: 139, SEQ ID NO: 141, SEQ ID NO: 143, SEQ ID NO: 145, SEQ ID NO: 147, SEQ ID NO: 149, SEQ ID NO: 151, SEQ ID NO: 153, SEQ ID NO: 155, SEQ ID NO: 157, SEQ ID NO: 159, SEQ ID NO: 161, SEQ ID NO: 163, SEQ ID NO: 165, SEQ ID NO: 167, SEQ ID NO: 169, SEQ ID NO: 171, SEQ ID NO: 173, SEQ ID NO: 175, SEQ ID NO: 177, SEQ ID NO: 179, SEQ ID NO: 181, SEQ ID NO: 183, SEQ ID NO: 185, SEQ ID NO: 189, SEQ ID NO: 191, SEQ ID NO: 193, SEQ ID NO: 195, SEQ ID NO: 199, SEQ ID NO: 201, SEQ ID NO: 203, SEQ ID NO: 205, SEQ ID NO: 207, SEQ ID NO: 209, SEQ ID NO: 211, SEQ ID NO: 213, SEQ ID NO: 215, SEQ ID NO: 217, SEQ ID NO: 219, SEQ ID NO: 221, SEQ ID NO: 223, SEQ ID NO: 225, SEQ ID NO: 227, SEQ ID NO: 229, SEQ ID NO: 231, SEQ ID NO: 233, SEQ ID NO: 235, SEQ ID NO: 237, SEQ ID NO: 239, SEQ ID NO: 241, SEQ ID NO: 243, SEQ ID NO: 245, SEQ ID NO: 251, SEQ ID NO: 253, SEQ ID NO: 255, SEQ ID NO: 257, SEQ ID NO: 259, SEQ ID NO: 261, SEQ ID NO: 263, SEQ ID NO: 267, SEQ ID NO: 269, SEQ ID NO: 271, SEQ ID NO: 275, SEQ ID NO: 277, SEQ ID NO: 279, SEQ ID NO: 281, SEQ ID NO: 283, SEQ ID NO: 285, SEQ ID NO: 287, SEQ ID NO: 289, SEQ ID NO: 291, SEQ ID NO: 293, SEQ ID NO: 295, SEQ ID NO: 297, SEQ ID NO: 299, SEQ ID NO: 301, SEQ ID NO: 303, SEQ ID NO: 305, SEQ ID NO: 307, SEQ ID NO: 309, SEQ ID NO: 311, SEQ ID NO: 313, SEQ ID NO: 315, SEQ ID NO: 317, SEQ ID NO: 321, SEQ ID NO: 323, SEQ ID NO: 325, SEQ ID NO: 329, SEQ ID NO: 331, SEQ ID NO: 333, SEQ ID NO: 335, SEQ ID NO: 337, SEQ ID NO: 339, SEQ ID NO: 341, SEQ ID NO: 343, SEQ ID NO: 345, SEQ ID NO: 347, SEQ ID NO: 349, SEQ ID NO: 351, SEQ ID NO: 353, SEQ ID NO: 355, SEQ ID NO: 357, SEQ ID NO: 359, SEQ ID NO: 361, SEQ ID NO: 363, SEQ ID NO: 365, SEQ ID NO: 367, SEQ ID NO: 369, SEQ ID NO: 371, SEQ ID NO: 373, SEQ ID NO: 375, SEQ ID NO: 377, SEQ ID NO: 379, SEQ ID NO: 381, SEQ ID NO: 383, SEQ ID NO: 385, SEQ ID NO: 387, SEQ ID NO: 389, SEQ ID NO: 391, SEQ ID NO: 393, SEQ ID NO: 395, SEQ ID NO: 397, SEQ ID NO: 399, SEQ ID NO: 401, SEQ ID NO: 403, SEQ ID NO: 405, SEQ ID NO: 407, SEQ ID NO: 409, SEQ ID NO: 411, SEQ ID NO: 413, SEQ ID NO: 415, SEQ ID NO: 417, SEQ ID NO: 419, SEQ ID NO: 421, SEQ ID NO: 423, SEQ ID NO: 425, SEQ ID NO: 427, SEQ ID NO: 429, SEQ ID NO: 431, SEQ ID NO: 437, SEQ ID NO: 439, SEQ ID NO: 441, SEQ ID NO: 443, SEQ ID NO: 445, SEQ ID NO: 447, SEQ ID NO: 449, SEQ ID NO: 451, SEQ ID NO: 453, SEQ ID NO: 455, SEQ ID NO: 457, SEQ ID NO: 459, SEQ ID NO: 461, SEQ ID NO: 463, SEQ ID NO: 465, SEQ ID NO: 467, SEQ ID NO: 469, SEQ ID NO: 471, SEQ ID NO: 473, SEQ ID NO: 475, SEQ ID NO: 477, SEQ ID NO: 479, SEQ ID NO: 481, SEQ ID NO: 483, SEQ ID NO: 485, SEQ ID NO: 487, SEQ ID NO: 489, SEQ ID NO: 491, SEQ ID NO: 493, SEQ ID NO: 495, SEQ ID NO: 497, SEQ ID NO: 499, SEQ ID NO: 501, SEQ ID NO: 503, SEQ ID NO: 505, SEQ ID NO: 507, SEQ ID NO: 509, SEQ ID NO: 511, SEQ ID NO: 513, SEQ ID NO: 515, SEQ ID NO: 517, SEQ ID NO: 519, SEQ ID NO: 521, SEQ ID NO: 523, SEQ ID NO: 525, SEQ ID NO: 527, SEQ ID NO: 529, SEQ ID NO: 531, SEQ ID NO: 533, SEQ ID NO: 535, SEQ ID NO: 537, SEQ ID NO: 539, SEQ ID NO: 541, SEQ ID NO: 543, SEQ ID NO: 545, SEQ ID NO: 547, SEQ ID NO: 549, SEQ ID NO: 551, SEQ ID NO: 553, SEQ ID NO: 555 and SEQ ID NO: 557.

[0223] The nucleotide molecule represented by the sequence SEQ ID NO: 2q-1 codes for the protein represented by the sequence SEQ ID NO: 2q. Thus, for instance, the nucleotide molecule represented by the sequence SEQ ID NO: 3 codes for the protein represented by the sequence SEQ ID NO: 4, the nucleotide molecule represented by the sequence SEQ ID NO: codes for the protein represented by the sequence SEQ ID NO: 6, the nucleotide molecule represented by the sequence SEQ ID NO: 7 codes for the protein represented by the sequence SEQ ID NO: 8, etc. . . .

[0224] The above nucleotide sequences represented in the invention are not limited to the specific sequences disclosed.

[0225] The invention also relates to all the nucleotide sequences coding for the above mutated netrin 4, or truncated protein thereof, corresponding to the sequences SEQ ID NO: 2q, q varying from 3 to 93, from 95 to 98, from 100 to 123, from 126 to 132, from 134 to 136, from 138 to 159, from 161 to 163, from 165 to 216 and from 219 to 279, according to the genetic code degeneracy, well known in the art.

[0226] Therefore, the invention relates to all nucleotide sequence variants coding for mutated netrin 4, and truncated protein thereof defined above, wherein the nucleotide change does not modify the coded corresponding amino acid.

[0227] The present invention relates to a recombinant vector, such as a plasmid, a cosmid, a phage or virus DNA, containing a nucleotide sequence as defined above, said recombinant vector being in particular characterized in that it contains the elements necessary for the expression in a host cell of the polypeptides encoded by the above-mentioned nucleotide sequences, inserted into said vector.

[0228] By “the elements necessary for the expression in a host cell” it is defined in the invention all the nucleotide sequences that allow the transcription of the above nucleotide sequence. These elements are for example, but not limited to, a viral promotor such as the CytoMegalo Virus (CMV) promotor, the Rous Sarcoma Virus (RSV) promotor, or a minimal promotor comprising TATA box . . . . These elements also comprise sequences allowing the termination of the transcription. These elements are known since a long time and well characterized for a skilled person.

[0229] The present invention also relates to a host cell, chosen in particular from bacteria, virus, yeasts, fungi cells, plant cells or mammal cells, said host cell being transformed, in particular using a recombinant vector as defined previously.

[0230] The present invention also relates to an antibody, characterized in that it is specifically directed against the mutated proteins of the invention, including mutated protein and truncated mutated protein thereof defined above.

[0231] The present invention also relates to an anti-idiotypic antibody of an antibody as mentioned above.

[0232] In a preferred embodiment, the present invention relates to a Fab fragment of the anti-idiotypic antibody defined above

[0233] The present invention also relates an anti-idiotypic, preferably a Fab fragment of said anti-idiotipic antibody, characterized in that it is specifically directed against the antibody defined above

[0234] In one particular embodiment, the present invention also relates to a Fab fragment of the above-mentioned anti-idiotypic antibodies.

[0235] The present invention also relates to a pharmaceutical composition comprising as active substance:
[0236] a mutated protein, or a truncated mutated protein, as defined above, or
[0237] a nucleotide sequence as defined above, or
[0238] an antibody as defined above, or
[0239] an anti-idiotypic antibody as defined above, or
[0240] a Fab fragment of anti-idiotypic antibodies as defined above,

[0241] in association with a pharmaceutically acceptable carrier.

[0242] The present invention also relates to the use as defined above of the mutated protein or truncated protein thereof, for the preparation of a drug to be delivered at an amount from about 0.1 to about 2,000 μg/kg, in particular by intravenous, subcutaneous, systemic or intravitreal route, or by local route with infiltrations or a collyrium, and possibly in association with a electropermeation.

[0243] The present invention relates also to a method for the delivery of an amount from about 0.1 to about 2,000 μg/kg/day of the above mutated protein, or truncated protein defined above, in particular by intravenous, subcutaneous, systemic or intravitreal route, or by local route with infiltrations or a collyrium, and possibly in association with a electropermeation.

[0244] Preferably the delivery of the above mutated protein, or truncated protein defined above is made for a period from about 1 day to six month, preferably from about 2 days to about three month, more preferably from about 10 days to about 30 days. The delivery can be a daily delivery, or the delivery can be made every two days, preferably every 4 days, more preferably every 5 days, more preferably every 10 days.

[0245] The mutated netrin 4, and the truncated proteins thereof, can also be delivered with an injection of a plasmid coding for the mutated netrin-4.

[0246] Alternatively, any one of the proteins or truncated proteins of the invention can be delivered by any intravascular device (stents) after the fixation of the protein or the truncated protein on said device.

[0247] The present invention also relates to the use of:
[0248] a mutated protein, or a truncated mutated protein, as defined above, or
[0249] a nucleotide sequence as defined above, or
[0250] an antibody as defined above, or
[0251] an anti-idiotypic antibody as defined above, or
[0252] a Fab fragment of anti-idiotypic antibodies as defined above,

[0253] for the preparation of a drug for the prevention or treatment of pathologies involving the inhibition of endothelial cell proliferation and/or migration, in particular for the prevention or treatment of pathologies chosen from the group consisting of: cancers and leukaemia, choroidal neovascularization, in particular myopia-complicating choroidal neovascularization, cornea neovascularization, in particular graft rejection, glaucoma, diabetic retinopathies or premature retinopathies, rheumatoid arthritis, psoriasis arthritis, angioma, angiosarcoma, Castleman's disease, and Kaposi's sarcoma, or for the treatment of obesity or retinal neovascularization.

[0254] In a preferred embodiment, the present invention relates to the use above-mentioned, wherein the mutated protein defined above or truncated protein thereof defined above, or antibody defined above, or nucleic acid defined above or the anti-idiotypic antibody defined above or the Fab fragment of the anti-idiotypic antibody defined above can be delivered at an amount from about 0.1 to about 2,000 μg/kg,

[0255] Preferably the delivery of the drug is made for a period from about 1 day to six month, preferably from about 2 days to about three month, more preferably from about 10 days to about 30 days. The delivery of the drug can be a daily delivery, or can be made every two days, preferably every 4 days, more preferably every 5 days, more preferably every 10 days.

[0256] The expression “inhibition of endothelial cell proliferation” designates any substance able to slow down the proliferation of endothelial cells according to the proliferation test as described hereafter.

[0257] In one preferred embodiment, the present invention relates to the use of:
[0258] a protein chosen among the group consisting in,
   [0259] SEQ ID NO: 6 or SEQ ID NO: 8, or
   [0260] the sequence of netrin 4, represented by SEQ ID NO: 2, containing
      [0261] one or two or three or four mutations and characterized in that it consists of one of the following sequence SEQ ID NO: 2q, q varying from 31 to 39, or
      [0262] ten or eleven or twelve or thirteen or fourteen mutations and characterized in that it consists of one of the following sequence of SEQ ID NO: 2q, q varying from 5 to 30, or
[0263] a truncated mutated protein derived from said mutated protein, consisting of one of the sequences SEQ ID NO: 2q, q varying from 40 to 93, from 95 to 98, from 100 to 123, from 126 to 132, from 134 to 136, from 138 to 159, from 161 to 163, from 165 to 216 and from 219 to 279.
   [0264] or
[0265] a nucleotide sequence chosen among the group consisting in SEQ ID NO: 2q-1, q varying from 3 to 93, from 95 to 98, from 100 to 123, from 126 to 132, from 134 to 136, from 138 to 159, from 161 to 163, from 165 to 216 and from 219 to 279, or
[0266] an antibody characterized in that it is specifically directed against a protein mentioned above, or
[0267] an anti-idiotypic antibody characterized in that it is specifically directed against an antibody mentioned above, or
[0268] a Fab fragment of anti-idiotypic antibodies characterized in that it is specifically directed against an antibody mentioned above,

[0269] for the preparation of a drug for the prevention or treatment of pathologies involving the inhibition of endothelial cell proliferation and/or migration, in particular for the prevention or treatment of pathologies chosen from the group consisting of: cancers and leukaemia, in particular angioma, angiosarcoma, Castleman's disease, Kaposi's sarcoma and rheumatoid arthritis.

[0270] The above-mentioned drug can be delivered at an amount from about 0.1 to about 2,000 μg/kg, Preferably the delivery of the drug is made for a period from about 1 day to six month, preferably from about 2 days to about three month, more preferably from about 10 days to about 30 days. The delivery of the drug can be a daily delivery, or can be made every two days, preferably every 4 days, more preferably every 5 days, more preferably every 10 days.

[0271] In one other preferred embodiment, the present invention relates to the use of:
[0272] a protein chosen among the group consisting in,
   [0273] SEQ ID NO: 6 or SEQ ID NO: 8, or
   [0274] the sequence of netrin 4, represented by SEQ ID NO: 2, containing
      [0275] one or two or three or four mutations and characterized in that it consists of one of the following sequence SEQ ID NO: 2q, q varying from 31 to 39, or
      [0276] ten or eleven or twelve or thirteen or fourteen mutations and characterized in that it consists of one of the following sequence of SEQ ID NO: 2q, q varying from 5 to 30, or
[0277] a truncated mutated protein derived from said mutated protein, consisting of one of the sequences SEQ ID NO: 2q, q varying from 40 to 93, from 95 to 98, from 100 to 123, from 126 to 132, from 134 to 136, from 138 to 159, from 161 to 163, from 165 to 216 and from 219 to 279.
   [0278] or
[0279] a nucleotide sequence chosen among the group consisting in SEQ ID NO: 2q-1, q varying from 3 to 93, from 95 to 98, from 100 to 123, from 126 to 132, from 134 to 136, from 138 to 159, from 161 to 163, from 165 to 216 and from 219 to 279, or
[0280] an antibody characterized in that it is specifically directed against a protein mentioned above, or
[0281] an anti-idiotypic antibody characterized in that it is specifically directed against an antibody mentioned above, or
[0282] a Fab fragment of anti-idiotypic antibodies characterized in that it is specifically directed against an antibody mentioned above,

[0283] for the preparation of a drug for the prevention or treatment of pathologies involving the inhibition of endothelial cell proliferation and/or migration, in particular for the prevention or treatment of pathologies chosen from the group consisting of: choroidal neovascularization, in particular myopia-complicating choroidal neovascularization, cornea neovascularization, in particular graft rejection, glaucoma, diabetic retinopathies or premature retinopathies, psoriasis arthritis, or for the treatment of obesity or retinal neovascularization.

[0284] The above-mentioned drug can be delivered at an amount from about 0.1 to about 2,000 μg/kg, Preferably the delivery of the drug is made for a period from about 1 day to six month, preferably from about 2 days to about three month, more preferably from about 10 days to about 30 days. The delivery of the drug can be a daily delivery, or can be made every two days, preferably every 4 days, more preferably every 5 days, more preferably every 10 days.

[0285] In one other preferred embodiment, the present invention relates to the use of:
[0286] a protein chosen among the group consisting in,
   [0287] the sequence of netrin 4, represented by SEQ ID NO: 2, containing
      [0288] one or two or three or four mutations and characterized in that it consists of one of the following sequence SEQ ID NO: 2q, q varying from 31 to 39, or
      [0289] ten or eleven or twelve or thirteen or fourteen or fifteen mutations and characterized in that it consists of one of the following sequence of SEQ ID NO: 2q, q varying from 5 to 30, or
   [0290] SEQ ID NO: 6 or SEQ ID NO: 8, or
[0291] a truncated mutated protein derived from said mutated protein, consisting of one of the sequences SEQ ID NO: 2q, q varying from 40 to 93, from 95 to 98, from 100 to 123, from 126 to 132, from 134 to 136, from 138 to 159, from 161 to 163, from 165 to 216 and from 219 to 279.
   [0292] or
[0293] a nucleotide sequence chosen among the group consisting in SEQ ID NO: 2q-1, q varying from 3 to 93, from 95 to 98, from 100 to 123, from 126 to 132, from 134 to 136, from 138 to 159, from 161 to 163, from 165 to 216 and from 219 to 279, or
[0294] an antibody characterized in that it is specifically directed against a protein mentioned above, or
[0295] an anti-idiotypic antibody characterized in that it is specifically directed against an antibody mentioned above, or
[0296] a Fab fragment of anti-idiotypic antibodies characterized in that it is specifically directed against an antibody mentioned above,

[0297] inhibition of endothelial cell proliferation and/or migration, in particular for the prevention or treatment of pathologies chosen from the group consisting of: choroidal neovascularization, in particular myopia-complicating choroidal neovascularization, cornea neovascularization, in particular graft rejection, glaucoma, diabetic retinopathies or premature retinopathies, psoriasis arthritis, or for the treatment of obesity or retinal neovascularization.

[0298] The present invention also relates to the use of:
[0299] an antibody as defined above, or
[0300] a Fab fragment of anti-idiotypic antibodies as defined above,

[0301] for the preparation of a drug for the prevention or treatment of pathologies involving the stimulation of endothelial cell proliferation and/or migration, in particular for the prevention or treatment of pathologies chosen from the group consisting of: ischemic pathologies such as arteritis of lower limbs, myocardium infarct, cerebral vascular accidents, scleroderma, and Raynaud's disease.

[0302] The above-mentioned drug can be delivered at an amount from about 0.1 to about 2,000 μg/kg, Preferably the delivery of the drug is made for a period from about 1 day to six month, preferably from about 2 days to about three month, more preferably from about 10 days to about 30 days. The delivery of the drug can be a daily delivery, or can be made every two days, preferably every 4 days, more preferably every 5 days, more preferably every 10 days.

[0303] Measurement of the activation of the endothelial cells proliferation can be carried out by placing the endothelial cells in an appropriate culture medium and by then measuring the total number of cells.

[0304] Measurement of the activation of the endothelial cells migration can be carried out by making a “wound” on a carpet of endothelial cells and then incubating the cells in the presence of the protein, the nucleotide sequence or the anti-idiotypic antibody to be tested. The number of cells having migrated onto the wound is then measured.

[0305] The present invention also relates to the use of:
[0306] a mutated protein, or a truncated mutated protein, as defined above, or
[0307] a nucleotide sequence as defined above, or
[0308] an antibody as defined above, or
[0309] an anti-idiotypic antibody as defined above, or
[0310] a Fab fragment of anti-idiotypic antibodies as defined above,

[0311] for the preparation of a drug for the prevention or treatment of non-tumoral pathologies linked to or caused by a pericyte or smooth muscular cell rarefaction, and requiring an activation of pericyte or smooth muscular cell proliferation or migration, said non-tumoral pathologies being in particular chosen from the group consisting of:
[0312] age-related macular degeneration,
[0313] neovascular glaucoma,
[0314] psoriasis,
[0315] atherosclerosis,
[0316] intestinal malformations,
[0317] Crohn's disease,
[0318] vascular or sub-cortical vascular dementia,
[0319] Alzheimer's disease,
[0320] bone degenerative pathologies, and fractures, and
[0321] aneurysms, and vascular dissections.

[0322] The above-mentioned drug can be delivered at an amount from about 0.1 to about 2,000 μg/kg, Preferably the delivery of the drug is made for a period from about 1 day to six month, preferably from about 2 days to about three month, more preferably from about 10 days to about 30 days. The delivery of the drug can be a daily delivery, or can be made every two days, preferably every 4 days, more preferably every 5 days, more preferably every 10 days.

[0323] The present invention also relates to the use as defined above, characterized in that the activity of activation of pericytes or smooth muscular cell proliferation or migration is measured according to the proliferation or migration test, and in that this activity of activation corresponds to at least 120% of the cells obtained in the absence of the protein, the nucleotide sequence, the antibody, the anti-idiotypic antibody or the Fab fragment of anti-idiotypic antibodies as defined above.

[0324] Measurement of the activation of the migration of pericytes or smooth muscular cells can be carried out by making a “wound” on a carpet of cells and then incubating the cells in the presence of the protein, the nucleotide sequence, the antibody, the anti-idiotypic antibody or the Fab fragment to be tested. The number of cells having migrated onto the wound is then measured.

[0325] Measurement of the activation of the proliferation of pericyte or smooth muscular cells can be carried out by placing the pericytes or smooth muscular cells in an appropriate culture medium, in particular in DMEM medium that does not contain any serum, and by measuring the total number of cells.

[0326] The present invention also relates to the use of a mutated protein defined above, in particular consisting of SEQ ID NO: 2q, q varying from 3 to 93, in association with a chemotherapy agent, for the preparation of a drug for the treatment of cancers, said chemotherapy agent being in particular chosen from the group consisting of: doxorubicin, methotrexate, vinblastine, vincristine, cladribine, fluorouracil, cytarabine, anthracyclines, cisplatin, cyclophosphamide, fludarabine, gemcitabine, aromatase inhibitors, irinotecan, navelbine, oxaliplatin, taxol, and docetaxel.

[0327] The present invention also relates to the use of
[0328] a mutated protein chosen among the group consisting in
   [0329] SEQ ID NO: 6 or SEQ ID NO: 8,
   [0330] the sequence of netrin 4, represented by SEQ ID NO: 2, containing
[0331] one or two or three or four mutations and characterized in that it consists of one of the following sequence SEQ ID NO: 2q, q varying from 31 to 39, or
[0332] ten or eleven or twelve or thirteen or fourteen mutations and characterized in that it consists of one of the following sequence of SEQ ID NO: 2q, q varying from 5 to 30, and
[0333] a truncated protein derived from said mutated protein, characterized in that it consists of one of the following sequence SEQ ID NO: 2q, q varying from 40 to 93.

[0334] in association with a chemotherapy agent, for the preparation of a drug for the treatment of cancers.

[0335] The above-mentioned drug can be delivered at an amount from about 0.1 to about 2,000 μg/kg. Preferably the delivery of the drug is made for a period from about 1 day to six month, preferably from about 2 days to about three month, more preferably from about 10 days to about 30 days. The delivery of the drug can be a daily delivery, or can be made every two days, preferably every 4 days, more preferably every 5 days, more preferably every 10 days.

[0336] By cancer, it is defined in the invention all the pathologies associated with a miss regulation of natural cellular proliferation, which is enhanced by the neo vascularization.

[0337] The present invention also relates to a pharmaceutical composition comprising
[0338] a mutated protein, or a truncated mutated protein, defined above, in particular consisting of SEQ ID NO: 2q, q varying from 3 to 93, and
[0339] a chemotherapy agent,
[0340] in association with a pharmaceutically acceptable carrier,
   [0341] said chemotherapy agent being in particular chosen from the group consisting of: doxorubicin, methotrexate, vinblastine, vincristine, cladribine, fluorouracil, cytarabine, anthracyclines, cisplatin, cyclophosphamide, fludarabine, gemcitabine, aromatase inhibitors, irinotecan, navelbine, oxaliplatin, taxol, and docetaxel.
      The present invention also relates to a pharmaceutical pharmaceutical composition comprising
[0342] a mutated protein according to claim 1 or 2 or 3, in particular consisting of one of the following sequences SEQ ID NO: 6, SEQ ID NO: 8, SEQ ID NO: 12, SEQ ID NO: 14, SEQ ID NO: 16, SEQ ID NO: 24, SEQ ID NO: 26, SEQ ID NO: 28, SEQ ID NO: 36, SEQ ID NO: 40, SEQ ID NO: 46, SEQ ID NO: 48, SEQ ID NO: 50, SEQ ID NO: 58, SEQ ID NO: 62, SEQ ID NO: 66, SEQ ID NO: 68, SEQ ID NO: 70, SEQ ID NO: 72, SEQ ID NO: 74, SEQ ID NO: 76, SEQ ID NO: 78, SEQ ID NO: 80, SEQ ID NO: 84, SEQ ID NO: 86, SEQ ID NO: 88, SEQ ID NO: 96, SEQ ID NO: 98, SEQ ID NO: 100, SEQ ID NO: 108, SEQ ID NO: 112, SEQ ID NO: 120, SEQ ID NO: 122, SEQ ID NO: 124, SEQ ID NO: 126, SEQ ID NO: 128, SEQ ID NO: 130, SEQ ID NO: 132, SEQ ID NO: 134, SEQ ID NO: 138, SEQ ID NO: 140, SEQ ID NO: 142, SEQ ID NO: 150, SEQ ID NO: 152, SEQ ID NO: 154, SEQ ID NO: 162, SEQ ID NO: 166, SEQ ID NO: 174, SEQ ID NO: 176, SEQ ID NO: 178, SEQ ID NO: 180, SEQ ID NO: 182, SEQ ID NO: 184 and SEQ ID NO: 186, and
[0343] a chemotherapy agent,
[0344] in association with a pharmaceutically acceptable carrier,
   [0345] said chemotherapy agent being in particular chosen from the group consisting of: doxorubicin, methotrexate, vinblastine, vincristine, cladribine, fluorouracil, cytarabine, anthracyclines, cisplatin, cyclophosphamide, fludarabine, gemcitabine, aromatase inhibitors, irinotecan, navelbine, oxaliplatin, taxol, and docetaxel.

[0346] The above-mentioned drug can be delivered at an amount from about 0.1 to about 2,000 μg/kg. Preferably the delivery of the drug is made for a period from about 1 day to six month, preferably from about 2 days to about three month, more preferably from about 10 days to about 30 days. The delivery of the drug can be a daily delivery, or can be made every two days, preferably every 4 days, more preferably every 5 days, more preferably every 10 days.

[0347] The combination of an anti-angiogenic agent with a chemotherapy agent allows the obtaining of a synergic effect and the induction of a reduced resistance to the usual anti-tumoral treatments.

[0348] The present invention also relates to the use of:
[0349] a mutated protein derived from netrin 4 represented by the sequence SEQ ID NO:2 comprising or consisting of
   [0350] SEQ ID NO: 6 or SEQ ID NO: 8, or
   [0351] the sequence of netrin 4, represented by SEQ ID NO: 2, containing
      [0352] one or two or three or four mutations and characterized in that it consists of one of the following sequence SEQ ID NO: 2q, q varying from 31 to 39, or
      [0353] twelve or thirteen or fourteen or fifteen mutations and characterized in that it consists of one of the following sequence of SEQ ID NO: 2q, q varying from 5 to 30, or
[0354] a truncated mutated protein derived from said mutated protein, consisting of one of the sequences SEQ ID NO: 2q, q varying from 40 to 93, from 95 to 98, from 100 to 123, from 126 to 132, from 134 to 136, from 138 to 159, from 161 to 163, from 165 to 216 and from 219 to 279,

[0355] in association with an anti-angiogenic agent chosen in particular from the group consisting of: AVASTIN (bevacizumab) manufactured by Genentech and Roche, MACUGEN (pegaptanib) manufactured by Eyetech and Pfizer, and LUCENTIS (ranibizumab) manufactured by Genentech and Novartis, or any other anti-VEGF agent, such as Sutent (Pfizer) or Sorafenib,), humanized antibodies against neuropiline-1 or any other anti-VEGF agent or any other anti-VEGF agent, such as SUTENT (sunitinib) or NEXAVAR (Sorafenib) as well as humanized antibodies against DLL4 or agents interfering with the angiopoietins pathways such as AM 386,

[0356] for the preparation of a drug for the prevention or treatment of tumoral or non-tumoral pathologies as defined above.
[0357] The present invention also relates to the use of a mutated protein derived from netrin 4 represented by the sequence SEQ ID NO:2 comprising or consisting of
   [0358] SEQ ID NO: 6 or SEQ ID NO: 8, or
   [0359] the sequence of netrin 4, represented by SEQ ID NO: 2, containing
      [0360] one or two or three or four mutations and characterized in that it consists of one of the following sequence SEQ ID NO: 2q, q equals to 31, or varying from 33 to 39, or
      [0361] ten or eleven or twelve or thirteen or fourteen mutations and characterized in that it consists of one of the following sequence of SEQ ID NO: 2q, q varying from 6 to 8, or from 12 to 14, or equals 18, or equals 20, or varying from 23 to 25, or equals to 29, or
   [0362] a truncated mutated protein derived from said mutated protein, consisting of one of the following sequences SEQ ID NO: 80, SEQ ID NO: 84, SEQ ID NO: 86, SEQ ID NO: 88, SEQ ID NO: 96, SEQ ID NO: 98, SEQ ID NO: 100, SEQ ID NO: 108, SEQ ID NO: 112, SEQ ID NO: 120, SEQ ID NO: 122, SEQ ID NO: 124, SEQ ID NO: 126, SEQ ID NO: 128, SEQ ID NO: 130, SEQ ID NO: 132, SEQ ID NO: 134, SEQ ID NO: 138, SEQ ID NO: 140, SEQ ID NO: 142, SEQ ID NO: 150, SEQ ID NO: 152, SEQ ID NO: 154, SEQ ID NO: 162, SEQ ID NO: 166, SEQ ID NO: 174, SEQ ID NO: 176, SEQ ID NO: 178, SEQ ID NO: 180, SEQ ID NO: 182, SEQ ID NO: 184, SEQ ID NO: 186, SEQ ID NO: 190, SEQ ID NO: 194, SEQ ID NO: 196, SEQ ID NO: 206, SEQ ID NO: 208, SEQ ID NO: 210, SEQ ID NO: 218, SEQ ID NO: 222, SEQ ID NO: 228, SEQ ID NO: 230, SEQ ID NO: 232, SEQ ID NO: 240, SEQ ID NO: 244, SEQ ID NO: 252, SEQ ID NO: 254, SEQ ID NO: 256, SEQ ID NO: 258, SEQ ID NO: 260, SEQ ID NO: 262, SEQ ID NO: 264, SEQ ID NO: 270, SEQ ID NO: 272, SEQ ID NO: 282, SEQ ID NO: 284, SEQ ID NO: 286, SEQ ID NO: 294, SEQ ID NO: 298, SEQ ID NO: 306, SEQ ID NO: 308, SEQ ID NO: 310, SEQ ID NO: 312, SEQ ID NO: 314, SEQ ID NO: 316, SEQ ID NO: 318, SEQ ID NO: 324, SEQ ID NO: 326, SEQ ID NO: 336, SEQ ID NO: 338, SEQ ID NO: 340, SEQ ID NO: 348, SEQ ID NO: 352, SEQ ID NO: 360, SEQ ID NO: 362, SEQ ID NO: 364, SEQ ID NO: 366, SEQ ID NO: 368, SEQ ID NO: 370, SEQ ID NO: 372, SEQ ID NO: 374, SEQ ID NO: 376, SEQ ID NO: 380, SEQ ID NO: 382, SEQ ID NO: 384, SEQ ID NO: 392, SEQ ID NO: 394, SEQ ID NO: 396, SEQ ID NO: 404, SEQ ID NO: 408, SEQ ID NO: 414, SEQ ID NO: 416, SEQ ID NO: 418, SEQ ID NO: 426, SEQ ID NO: 430, SEQ ID NO: 438, SEQ ID NO: 440, SEQ ID NO: 442, SEQ ID NO: 444, SEQ ID NO: 446, SEQ ID NO: 448, SEQ ID NO: 450, SEQ ID NO: 452, SEQ ID NO: 456, SEQ ID NO: 458, SEQ ID NO: 460, SEQ ID NO: 468, SEQ ID NO: 470, SEQ ID NO: 472, SEQ ID NO: 480, SEQ ID NO: 484, SEQ ID NO: 492, SEQ ID NO: 494, SEQ ID NO: 496, SEQ ID NO: 498, SEQ ID NO: 500, SEQ ID NO: 502, SEQ ID NO: 504, SEQ ID NO: 506, SEQ ID NO: 510, SEQ ID NO: 512, SEQ ID NO: 514, SEQ ID NO: 522, SEQ ID NO: 524, SEQ ID NO: 526, SEQ ID NO: 534, SEQ ID NO: 538, SEQ ID NO: 546, SEQ ID NO: 548, SEQ ID NO: 550, SEQ ID NO: 552, SEQ ID NO: 554, SEQ ID NO: 556 and SEQ ID NO: 558
   [0363] in association with an anti-angiogenic agent chosen in particular from the group consisting of: AVASTIN (bevacizumab), MACUGEN (pegaptanib), and LUCENTIS (ranibizumab), or any other anti-VEGF agent, humanized antibodies against neuropiline-1 or any other anti-VEGF agent or any other anti-VEGF agent, such as SUTENT (sunitinib) or NEXAVAR (Sorafenib) as well as humanized antibodies against DLL4 or agents interfering with the angiopoietins pathways such as AM 386,
   [0364] for the preparation of a drug for the prevention or treatment of tumoral pathologies, or non-tumoral pathologies as above.

[0365] The above-mentioned drug can be delivered at an amount from about 0.1 to about 2,000 μg/kg. Preferably the delivery of the drug is made for a period from about 1 day to six month, preferably from about 2 days to about three month, more preferably from about 10 days to about 30 days. The delivery of the drug can be a daily delivery, or can be made every two days, preferably every 4 days, more preferably every 5 days, more preferably every 10 days.

[0366] In particular, in the present invention, the doses of the mutated netrin-4 or truncated protein thereof vary from about 10 to about 10,000 ng/injection, in particular from about 100 to about 5,000 ng/injection, every 6 weeks.

[0367] In the present invention, the doses of the anti-angiogenic agent (AVASTIN, MACUGEN or LUCENTIS for example) vary from about 0.3 to about 1 mg every 6 weeks.

[0368] The present invention also relates to a combination product comprising:
[0369] a mutated protein derived from netrin 4 represented by the sequence SEQ ID NO:2 comprising or consisting of
   [0370] SEQ ID NO: 6 or SEQ ID NO: 8, or
   [0371] the sequence of netrin 4, represented by SEQ ID NO: 2, containing
      [0372] one or two or three or four mutations and characterized in that it consists of one of the following sequence SEQ ID NO: 2q, q varying from 31 to 39, or
      [0373] ten or eleven or twelve or thirteen or fourteen mutations and characterized in that it consists of one of the following sequence of SEQ ID NO: 2q, q varying from 5 to 30, or
[0374] a truncated mutated protein derived from said mutated protein, consisting of one of the sequences SEQ ID NO: 2q, q varying from 40 to 93, from 95 to 98, from 100 to 123, from 126 to 132, from 134 to 136, from 138 to 159, from 161 to 163, from 165 to 216 and from 219 to 279,
[0375] in association with an anti-angiogenic agent chosen in particular from the group consisting of: AVASTIN (bevacizumab), MACUGEN (pegaptanib), and LUCENTIS (ranibizumab), or any other anti-VEGF agent, such as Sutent or Sorafenib, humanized antibodies against neuropiline-1 or any other anti-VEGF agent or any other anti-VEGF agent, such as SUTENT (sunitinib) or NEXAVAR (Sorafenib) as well as humanized antibodies against DLL4 or agents interfering with the angiopoietins pathways such as AM 386,

[0376] for a simultaneous, separated or sequential use for the treatment or prevention of tumoral or non-tumoral pathologies as defined above.

[0377] The invention also relates to a combination product comprising:
[0378] a mutated protein derived from netrin 4 represented by the sequence SEQ ID NO:2 comprising or consisting of
   [0379] SEQ ID NO: 6 or SEQ ID NO: 8, or
   [0380] the sequence of netrin 4, represented by SEQ ID NO: 2, containing
      [0381] one or two or three or four mutations and characterized in that it consists of one of the following sequence SEQ ID NO: 2q, q equals to 31, or varying from 33 to 39, or
      [0382] ten or eleven or twelve or thirteen or fourteen mutations and characterized in that it consists of one of the following sequence of SEQ ID NO: 2q, q varying from 6 to 8, or from 12 to 14, or equals 18, or equals 20, or varying from 23 to 25, or equals to 29, or
   [0383] a truncated mutated protein derived from said mutated protein, consisting of one of the following sequences SEQ ID NO: 80, SEQ ID NO: 84, SEQ ID NO: 86, SEQ ID NO: 88, SEQ ID NO: 96, SEQ ID NO: 98, SEQ ID NO: 100, SEQ ID NO: 108, SEQ ID NO: 112, SEQ ID NO: 120, SEQ ID NO: 122, SEQ ID NO: 124, SEQ ID NO: 126, SEQ ID NO: 128, SEQ ID NO: 130, SEQ ID NO: 132, SEQ ID NO: 134, SEQ ID NO: 138, SEQ ID NO: 140, SEQ ID NO: 142, SEQ ID NO: 150, SEQ ID NO: 152, SEQ ID NO: 154, SEQ ID NO: 162, SEQ ID NO: 166, SEQ ID NO: 174, SEQ ID NO: 176, SEQ ID NO: 178, SEQ ID NO: 180, SEQ ID NO: 182, SEQ ID NO: 184, SEQ ID NO: 186, SEQ ID NO: 190, SEQ ID NO: 194, SEQ ID NO: 196, SEQ ID NO: 206, SEQ ID NO: 208, SEQ ID NO: 210, SEQ ID NO: 218, SEQ ID NO: 222, SEQ ID NO: 228, SEQ ID NO: 230, SEQ ID NO: 232, SEQ ID NO: 240, SEQ ID NO: 244, SEQ ID NO: 252, SEQ ID NO: 254, SEQ ID NO: 256, SEQ ID NO: 258, SEQ ID NO: 260, SEQ ID NO: 262, SEQ ID NO: 264, SEQ ID NO: 270, SEQ ID NO: 272, SEQ ID NO: 282, SEQ ID NO: 284, SEQ ID NO: 286, SEQ ID NO: 294, SEQ ID NO: 298, SEQ ID NO: 306, SEQ ID NO: 308, SEQ ID NO: 310, SEQ ID NO: 312, SEQ ID NO: 314, SEQ ID NO: 316, SEQ ID NO: 318, SEQ ID NO: 324, SEQ ID NO: 326, SEQ ID NO: 336, SEQ ID NO: 338, SEQ ID NO: 340, SEQ ID NO: 348, SEQ ID NO: 352, SEQ ID NO: 360, SEQ ID NO: 362, SEQ ID NO: 364, SEQ ID NO: 366, SEQ ID NO: 368, SEQ ID NO: 370, SEQ ID NO: 372, SEQ ID NO: 374, SEQ ID NO: 376, SEQ ID NO: 380, SEQ ID NO: 382, SEQ ID NO: 384, SEQ ID NO: 392, SEQ ID NO: 394, SEQ ID NO: 396, SEQ ID NO: 404, SEQ ID NO: 408, SEQ ID NO: 414, SEQ ID NO: 416, SEQ ID NO: 418, SEQ ID NO: 426, SEQ ID NO: 430, SEQ ID NO: 438, SEQ ID NO: 440, SEQ ID NO: 442, SEQ ID NO: 444, SEQ ID NO: 446, SEQ ID NO: 448, SEQ ID NO: 450, SEQ ID NO: 452, SEQ ID NO: 456, SEQ ID NO: 458, SEQ ID NO: 460, SEQ ID NO: 468, SEQ ID NO: 470, SEQ ID NO: 472, SEQ ID NO: 480, SEQ ID NO: 484, SEQ ID NO: 492, SEQ ID NO: 494, SEQ ID NO: 496, SEQ ID NO: 498, SEQ ID NO: 500, SEQ ID NO: 502, SEQ ID NO: 504, SEQ ID NO: 506, SEQ ID NO: 510, SEQ ID NO: 512, SEQ ID NO: 514, SEQ ID NO: 522, SEQ ID NO: 524, SEQ ID NO: 526, SEQ ID NO: 534, SEQ ID NO: 538, SEQ ID NO: 546, SEQ ID NO: 548, SEQ ID NO: 550, SEQ ID NO: 552, SEQ ID NO: 554, SEQ ID NO: 556 and SEQ ID NO: 558,
[0384] in association with an anti-angiogenic agent chosen in particular from the group consisting of: AVASTIN (bevacizumab), MACUGEN (pegaptanib), and LUCENTIS (ranibizumab), or any other anti-VEGF agent, such as Sutent or Sorafenib, humanized antibodies against neuropiline-1 or any other anti-VEGF agent or any other anti-VEGF agent, such as SUTENT (sunitinib) or NEXAVAR (Sorafenib) as well as humanized antibodies against DLL4 or agents interfering with the angiopoietins pathways such as AM 386,
   [0385] for a simultaneous, separated or sequential use for the treatment or prevention of tumoral pathologies, or non-tumoral pathologies as defined above.

[0386] The above-mentioned drug can be delivered at an amount from about 0.1 to about 2,000 μg/kg. Preferably the delivery of the drug is made for a period from about 1 day to six month, preferably from about 2 days to about three month, more preferably from about 10 days to about 30 days. The delivery of the drug can be a daily delivery, or can be made every two days, preferably every 4 days, more preferably every 5 days, more preferably every 10 days.

[0387] The present invention also relates to the use of:
[0388] a mutated protein derived from netrin 4 represented by the sequence SEQ ID NO:2 comprising or consisting of
   [0389] SEQ ID NO: 6 or SEQ ID NO: 8, or
   [0390] the sequence of netrin 4, represented by SEQ ID NO: 2, containing
      [0391] one or two or three or four mutations and characterized in that it consists of one of the following sequence SEQ ID NO: 2q, q varying from 31 to 39, or
      [0392] ten or eleven or twelve or thirteen or fourteen or fifteen mutations and characterized in that it consists of one of the following sequence of SEQ ID NO: 2q, q varying from 5 to 30, or
[0393] a truncated mutated protein derived from said mutated protein, consisting of one of the sequences SEQ ID NO: 2q, q varying from 40 to 93, from 95 to 98, from 100 to 123, from 126 to 132, from 134 to 136, from 138 to 159, from 161 to 163, from 165 to 216 and from 219 to 279.
   to select, differentiate and/or expand pericytes or smooth muscular cells from any sampling of progenitor cells or stem cells for cell therapy.

[0394] The present invention also relates to the use of:
[0395] a mutated protein derived from netrin 4 represented by the sequence SEQ ID NO:2 comprising or consisting of
   [0396] SEQ ID NO: 6 or SEQ ID NO: 8, or
   [0397] the sequence of netrin 4, represented by SEQ ID NO: 2, containing
      [0398] one or two or three or four mutations and characterized in that it consists of one of the following sequence SEQ ID NO: 2q, q varying from 31 to 39, or
      [0399] ten or eleven or twelve or thirteen or fourteen mutations and characterized in that it consists of one of the following sequence of SEQ ID NO: 2q, q varying from 5 to 30, or
[0400] a truncated mutated protein derived from said mutated protein, consisting of one of the sequences SEQ ID NO: 2q, q varying from 40 to 93, from 95 to 98, from 100 to 123, from 126 to 132, from 134 to 136, from 138 to 159, from 161 to 163, from 165 to 216 and from 219 to 279.
   in combination with pericytes or vascular smooth muscle cells differentiated as mentioned above to maturate tumoral vascularization and therefore inhibiting cancer progression.
   The present invention also relates to the use of:
   a mutated protein, or a truncated mutated protein, consisting of SEQ ID NO: 2q, q varying from 3 to 93,
   in association with pericytes or vascular smooth muscle cells, for the preparation of a drug for the treatment of cancers.

[0401] The above-mentioned drug can be delivered at an amount from about 0.1 to about 2,000 μg/kg. Preferably the delivery of the drug is made for a period from about 1 day to six month, preferably from about 2 days to about three month, more preferably from about 10 days to about 30 days. The delivery of the drug can be a daily delivery, or can be made every two days, preferably every 4 days, more preferably every 5 days, more preferably every 10 days.

[0402] The present invention also relates to a pharmaceutical composition comprising pericytes or vascular smooth muscle cells, in association with the protein represented by SEQ ID NO: 2q, q varying from 40 to 93, from 95 to 98, from 100 to 123, from 126 to 132, from 134 to 136, from 138 to 159, from 161 to 163, from 165 to 216 and from 219 to 279.

[0403] The present invention also relates to a combination product comprising:
[0404] a mutated protein, or a truncated mutated protein, consisting of SEQ ID NO: 2q, q varying from 3 to 93,
[0405] with pericytes or vascular smooth muscle cells,

[0406] for a simultaneous, separated or sequential use for the treatment of cancers.

[0407] The two following tables recapitulate the characteristics of the proteins, and truncated protein thereof of the present invention.

| | Protein sequence | Nucleotide sequence |
|---|---|---|
| Proteins | | |
| Native netrin 4 (with, signal peptide)(1-628) | SEQ ID NO: 2 | SEQ ID NO: 1 |
| Mutated netrin 4 (with signal peptide)(1-628) | SEQ ID NO: 4 | SEQ ID NO: 3 |
| Substitution mutant proteins | | |
| Mutated protein with 15 mutations(1-637) | SEQ ID NO: 6 | SEQ ID NO: 5 |
| Mutated protein with 14 mutations (13)(1-637) | SEQ ID NO: 8 | SEQ ID NO: 7 |
| Mutated protein with 14 mutations (33l)(1-628) | SEQ ID NO: 10 | SEQ ID NO: 9 |
| Mutated protein with 14 mutations (332)(1-628) | SEQ ID NO: 12 | SEQ ID NO: 11 |
| Mutated protein with 14 mutations (353)(1-628) | SEQ ID NO: 14 | SEQ ID NO: 13 |
| Mutated protein with 14 mutations (472)(1-628) | SEQ ID NO: 16 | SEQ ID NO: 15 |
| Mutated protein with 13 mutations (331-332)(1-628) | SEQ ID NO: 18 | SEQ ID NO: 17 |
| Mutated protein with 13 mutations (331-353)(1-628) | SEQ ID NO: 20 | SEQ ID NO: 19 |
| Mutated protein with 13 mutations (331-472)(1-628) | SEQ ID NO: 22 | SEQ ID NO: 21 |
| Mutated protein with 13 mutations (332-353)(1-628) | SEQ ID NO: 24 | SEQ ID NO: 23 |
| Mutated protein with 13 mutations (332-472)(1-628) | SEQ ID NO: 26 | SEQ ID NO: 25 |
| Mutated protein with 13 mutations (353-472)(1-628) | SEQ ID NO: 28 | SEQ ID NO: 27 |
| Mutated protein with 12 mutations (331-332-353)(1-628) | SEQ ID NO: 30 | SEQ ID NO: 29 |
| Mutated protein with 12 mutations (331-332-472)(1-628) | SEQ ID NO: 32 | SEQ ID NO: 31 |
| Mutated protein with 12 mutations (331-353-472)(1-628) | SEQ ID NO: 34 | SEQ ID NO: 33 |
| Mutated protein with 12 mutations (332-353-472)(1-628) | SEQ ID NO: 36 | SEQ ID NO: 35 |
| Mutated protein with 11 mutations (331-332-353-472)(1-628) | SEQ ID NO: 38 | SEQ ID NO: 37 |
| Mutated protein with 13 mutations (13-353)(1-628) | SEQ ID NO: 40 | SEQ ID NO: 39 |
| Mutated protein with 12 mutations (13-331-353)(1-628) | SEQ ID NO: 42 | SEQ ID NO: 41 |
| Mutated protein with 12 mutations (13-331-472)(1-628) | SEQ ID NO: 44 | SEQ ID NO: 43 |
| Mutated protein with 12 mutations (13-332-353)(1-628) | SEQ ID NO: 46 | SEQ ID NO: 45 |
| Mutated protein with 12 mutations (13-332-472)(1-628) | SEQ ID NO: 48 | SEQ ID NO: 47 |
| Mutated protein with 12 mutations (13-353-472)(1-628) | SEQ ID NO: 50 | SEQ ID NO: 49 |
| Mutated protein with 11 mutations (13-331-332-353)(1-628) | SEQ ID NO: 52 | SEQ ID NO: 51 |
| Mutated protein with 11 mutations (13-331-332-472)(1-628) | SEQ ID NO: 54 | SEQ ID NO: 53 |
| Mutated protein with 11 mutations (13-331-353-472)(1-628) | SEQ ID NO: 56 | SEQ ID NO: 55 |
| Mutated protein with 11 mutations (13-332-353-472)(1-628) | SEQ ID NO: 58 | SEQ ID NO: 57 |
| Mutated protein with 10 mutations (13-331-332-353-472)(1-628) | SEQ ID NO: 60 | SEQ ID NO: 59 |
| Mutated protein with 1 mutation 331 (1-628) | SEQ ID NO: 62 | SEQ ID NO: 61 |
| Mutated protein with 1 mutation 332 (1-628) | SEQ ID NO: 64 | SEQ ID NO: 63 |
| Mutated protein with 2 mutations 331-332 (1-628) | SEQ ID NO: 66 | SEQ ID NO: 65 |
| Mutated protein with 2 mutations 331-353 (1-628) | SEQ ID NO: 69 | SEQ ID NO: 67 |
| Mutated protein with 2 mutations 331-472 (1-628) | SEQ ID NO: 70 | SEQ ID NO: 69 |
| Mutated protein with 3 mutations 331-332-353 (1-628) | SEQ ID NO: 72 | SEQ ID NO: 71 |
| Mutated protein with 3 mutations 331-332-472 (1-628) | SEQ ID NO: 74 | SEQ ID NO: 73 |
| Mutated protein with 3 mutations 331-353-472 (1-628) | SEQ ID NO: 76 | SEQ ID NO: 75 |
| Mutated protein with 4 mutations 331-332-353-472 (1-628) | SEQ ID NO: 78 | SEQ ID NO: 77 |
| Mutated truncated protein with 15 mutations +9 aa without signal peptide (20-637) | SEQ ID NO: 80 | SEQ ID NO: 79 |
| Mutated truncated protein with 14 mutations (331) without signal peptide (20-628) | SEQ ID NO: 82 | SEQ ID NO: 81 |
| Mutated truncated protein with 14 mutations (332) without signal peptide (20-628) | SEQ ID NO: 84 | SEQ ID NO: 83 |
| Mutated truncated protein with 14 mutations (353) without signal peptide (20-628) | SEQ ID NO: 86 | SEQ ID NO: 85 |
| Mutated truncated protein with 14 mutations (472) without signal peptide (20-628) | SEQ ID NO: 88 | SEQ ID NO: 87 |
| Mutated truncated protein with 13 mutations (331-332) without signal peptide (20-628) | SEQ ID NO: 90 | SEQ ID NO: 89 |
| Mutated truncated protein with 13 mutations (331-353) without signal peptide (20-628) | SEQ ID NO: 92 | SEQ ID NO: 91 |
| Mutated truncated protein with 13 mutations (331-472) without signal peptide (20-628) | SEQ ID NO: 94 | SEQ ID NO: 93 |
| Mutated truncated protein with 13 mutations (332-353) without signal peptide (20-628) | SEQ ID NO: 96 | SEQ ID NO: 95 |
| Mutated truncated protein with 13 mutations (332-472) without signal peptide (20-628) | SEQ ID NO: 98 | SEQ ID NO: 97 |
| Mutated truncated protein with 13 mutations (353-472) without signal peptide (20-628) | SEQ ID NO: 100 | SEQ ID NO: 99 |
| Mutated truncated protein with 12 mutations (331-332-353) without signal peptide (20-628) | SEQ ID NO: 102 | SEQ ID NO: 101 |
| Mutated truncated protein with 12 mutations (331-332-472) without signal peptide (20-628) | SEQ ID NO: 104 | SEQ ID NO: 103 |
| Mutated truncated protein with 12 mutations (331-353-472) without signal peptide (20-628) | SEQ ID NO: 106 | SEQ ID NO: 105 |
| Mutated truncated protein with 12 mutations (332-353-472) without signal peptide (20-628) | SEQ ID NO: 108 | SEQ ID NO: 107 |
| Mutated truncated protein with 11 mutations (331-332-353-472) without signal peptide (20-628) | SEQ ID NO: 110 | SEQ ID NO: 109 |
| Mutated truncated protein with 1 mutation 331 without signal peptide (20-628) | SEQ ID NO: 112 | SEQ ID NO: 111 |
| Mutated truncated protein with 1 mutation 332 without signal peptide (20-628) | SEQ ID NO: 114 | SEQ ID NO: 113 |
| Mutated truncated protein with 1 mutation 353 without signal peptide (20-628) | SEQ ID NO: 116 | SEQ ID NO: 115 |
| Mutated truncated protein with 1 mutation 472 without signal peptide (20-628) | SEQ ID NO: 118 | SEQ ID NO: 117 |
| Mutated truncated protein with 2 mutations 331-332 without signal peptide (20-628) | SEQ ID NO: 120 | SEQ ID NO: 119 |
| Mutated truncated protein with 2 mutations 331-353 without signal peptide (20-628) | SEQ ID NO: 122 | SEQ ID NO: 121 |
| Mutated truncated protein with 2 mutations 331-472 without signal peptide (20-628) | SEQ ID NO: 124 | SEQ ID NO: 123 |
| Mutated truncated protein with 3 mutations 331-332-353 without signal peptide (20-628) | SEQ ID NO: 126 | SEQ ID NO: 125 |
| Mutated truncated protein with 3 mutations 331-332-472 without signal peptide (20-628) | SEQ ID NO: 128 | SEQ ID NO: 127 |
| Mutated truncated protein with 3 mutations 331-353-472 without signal peptide (20-628) | SEQ ID NO: 130 | SEQ ID NO: 129 |
| Mutated truncated protein with 4 mutations 331-332-353-472 without signal peptide (20-628) | SEQ ID NO: 132 | SEQ ID NO: 131 |
| Mutated truncated protein with 15 mutations +9 aa without signal peptide (32-637) | SEQ ID NO: 134 | SEQ ID NO: 133 |
| Mutated truncated protein with 14 mutations (331) without signal peptide (32-628) | SEQ ID NO: 136 | SEQ ID NO: 135 |
| Mutated truncated protein with 14 mutations (332) without signal peptide (32-628) | SEQ ID NO: 138 | SEQ ID NO: 137 |
| Mutated truncated protein with 14 mutations (353) without signal peptide (32-628) | SEQ ID NO: 140 | SEQ ID NO: 139 |
| Mutated truncated protein with 14 mutations (472) without signal peptide (32-628) | SEQ ID NO: 142 | SEQ ID NO: 141 |
| Mutated truncated protein with 13 mutations (331-332) without signal peptide (32-628) | SEQ ID NO: 144 | SEQ ID NO: 143 |
| Mutated truncated protein with 13 mutations (331-353) without signal peptide (32-628) | SEQ ID NO: 146 | SEQ ID NO: 145 |
| Mutated truncated protein with 13 mutations (331-472) without signal peptide (32-628) | SEQ ID NO: 148 | SEQ ID NO: 147 |
| Mutated truncated protein with 13 mutations (332-353) without signal peptide (32-628) | SEQ ID NO: 150 | SEQ ID NO: 149 |
| Mutated truncated protein with 13 mutations (332-472) without signal peptide (32-628) | SEQ ID NO: 152 | SEQ ID NO: 151 |
| Mutated truncated protein with 13 mutations (353-472) without signal peptide (32-628) | SEQ ID NO: 154 | SEQ ID NO: 153 |
| Mutated truncated protein with 12 mutations (331-332-353) without signal peptide (32-628) | SEQ ID NO: 156 | SEQ ID NO: 155 |
| Mutated truncated protein with 12 mutations (331-332-472) without signal peptide (32-628) | SEQ ID NO: 158 | SEQ ID NO: 157 |
| Mutated truncated protein with 12 mutations (331-353-472) without signal peptide (32-628) | SEQ ID NO: 160 | SEQ ID NO: 159 |
| Mutated truncated protein with 12 mutations (332-353-472) without signal peptide (32-628) | SEQ ID NO: 162 | SEQ ID NO: 161 |
| Mutated truncated protein with 11 mutations (331-332-353-472) without signal peptide (32-628) | SEQ ID NO: 164 | SEQ ID NO: 163 |
| Mutated truncated protein with 1 mutation 331 without signal peptide (32-628) | SEQ ID NO: 166 | SEQ ID NO: 165 |
| Mutated truncated protein with 1 mutation 332 without signal peptide (32-628) | SEQ ID NO: 168 | SEQ ID NO: 167 |
| Mutated truncated protein with 1 mutation 353 without signal peptide (32-628) | SEQ ID NO: 170 | SEQ ID NO: 169 |
| Mutated truncated protein with 1 mutation 472 without signal peptide (32-628) | SEQ ID NO: 172 | SEQ ID NO: 171 |
| Mutated truncated protein with 2 mutations 331-332 without signal peptide (32-628) | SEQ ID NO: 174 | SEQ ID NO: 173 |
| Mutated truncated protein with 2 mutations 331-353 without signal peptide (32-628) | SEQ ID NO: 176 | SEQ ID NO: 175 |
| Mutated truncated protein with 2 mutations 331-472 without signal peptide (32-628) | SEQ ID NO: 178 | SEQ ID NO: 177 |
| Mutated truncated protein with 3 mutations 331-332-353 without signal peptide (32-628) | SEQ ID NO: 180 | SEQ ID NO: 179 |
| Mutated truncated protein with 3 mutations 331-332-472 without signal peptide (32-628) | SEQ ID NO: 182 | SEQ ID NO: 181 |
| Mutated truncated protein with 3 mutations 331-353-472 without signal peptide (32-628) | SEQ ID NO: 184 | SEQ ID NO: 183 |
| Mutated truncated protein with 4 mutations 331-332-353-472 without signal peptide (32-628) | SEQ ID NO: 186 | SEQ ID NO: 185 |
| Mutated truncated protein with 15 mutations +9 aa (1-515) | SEQ ID NO: 188 | SEQ ID NO: 187 |
| Mutated truncated protein with 14 mutations (13) +9 aa (1-515) | SEQ ID NO: 190 | SEQ ID NO: 189 |
| Mutated truncated protein with 14 mutations (331) (1-515) | SEQ ID NO: 192 | SEQ ID NO: 191 |
| Mutated truncated protein with 14 mutations (332) (1-515) | SEQ ID NO: 194 | SEQ ID NO: 193 |
| Mutated truncated protein with 14 mutations (353) (1-515) | SEQ ID NO: 196 | SEQ ID NO: 195 |
| Mutated truncated protein with 14 mutations (472) (1-515) | SEQ ID NO: 198 | SEQ ID NO: 197 |
| Mutated truncated protein with 13 mutations (331-332) (1-515) | SEQ ID NO: 200 | SEQ ID NO: 199 |
| Mutated truncated protein with 13 mutations (331-353) (1-515) | SEQ ID NO: 202 | SEQ ID NO: 201 |
| Mutated truncated protein with 13 mutations (331-472) (1-515) | SEQ ID NO: 204 | SEQ ID NO: 203 |
| Mutated truncated protein with 13 mutations (332-353) (1-515) | SEQ ID NO: 206 | SEQ ID NO: 205 |
| Mutated truncated protein with 13 mutations (332-472) (1-515) | SEQ ID NO: 208 | SEQ ID NO: 207 |
| Mutated truncated protein with 13 mutations (353-472) (1-515) | SEQ ID NO: 210 | SEQ ID NO: 209 |
| Mutated truncated protein with 12 mutations (331-332-353) (1-515) | SEQ ID NO: 212 | SEQ ID NO: 211 |
| Mutated truncated protein with 12 mutations (331-332-472) (1-515) | SEQ ID NO: 214 | SEQ ID NO: 213 |
| Mutated truncated protein with 12 mutations (331-353-472) (1-515) | SEQ ID NO: 216 | SEQ ID NO: 215 |
| Mutated truncated protein with 12 mutations (332-353-472) (1-515) | SEQ ID NO: 218 | SEQ ID NO: 217 |
| Mutated truncated protein with 11 mutations (331-332-353-472) (1-515) | SEQ ID NO: 220 | SEQ ID NO: 219 |
| Mutated truncated protein with 13 mutations (13-353) (1-515) | SEQ ID NO: 222 | SEQ ID NO: 221 |
| Mutated truncated protein with 12 mutations (13-331-353) (1-515) | SEQ ID NO: 224 | SEQ ID NO: 223 |
| Mutated truncated protein with 12 mutations (13-331-472) (1-515) | SEQ ID NO: 226 | SEQ ID NO: 225 |
| Mutated truncated protein with 12 mutations (13-332-353) (1-515) | SEQ ID NO: 228 | SEQ ID NO: 227 |
| Mutated truncated protein with 12 mutations (13-332-472) (1-515) | SEQ ID NO: 230 | SEQ ID NO: 229 |
| Mutated truncated protein with 12 mutations (13-353-472) (1-515) | SEQ ID NO: 232 | SEQ ID NO: 231 |
| Mutated truncated protein with 11 mutations (13-331-332-353) (1-515) | SEQ ID NO: 234 | SEQ ID NO: 233 |
| Mutated truncated protein with 11 mutations (13-331-332-472) (1-515) | SEQ ID NO: 236 | SEQ ID NO: 235 |
| Mutated truncated protein with 11 mutations (13-331-353-472) (1-515) | SEQ ID NO: 238 | SEQ ID NO: 237 |
| Mutated truncated protein with 11 mutations (13-332-353-472) (1-515) | SEQ ID NO: 240 | SEQ ID NO: 239 |
| Mutated truncated protein with 10 mutations (13-331-332-353-472) (1-515) | SEQ ID NO: 242 | SEQ ID NO: 241 |
| Mutated truncated protein with 1 mutation 331 (1-515) | SEQ ID NO: 244 | SEQ ID NO: 243 |
| Mutated truncated protein with 1 mutation 332 (1-515) | SEQ ID NO: 246 | SEQ ID NO: 245 |
| Mutated truncated protein with 1 mutation 353 (1-515) | SEQ ID NO: 248 | SEQ ID NO: 247 |
| Mutated truncated protein with 1 mutation 472 (1-515) | SEQ ID NO: 250 | SEQ ID NO: 249 |
| Mutated truncated protein with 2 mutations 331-332 (1-515) | SEQ ID NO: 252 | SEQ ID NO: 251 |
| Mutated truncated protein with 2 mutations 331-353 (1-515) | SEQ ID NO: 254 | SEQ ID NO: 253 |
| Mutated truncated protein with 2 mutations 331-472 (1-515) | SEQ ID NO: 256 | SEQ ID NO: 255 |
| Mutated truncated protein with 3 mutations 331-332-353 (1-515) | SEQ ID NO: 258 | SEQ ID NO: 257 |
| Mutated truncated protein with 3 mutations 331-332-472 (1-515) | SEQ ID NO: 260 | SEQ ID NO: 259 |
| Mutated truncated protein with 3 mutations 331-353-472 (1-515) | SEQ ID NO: 262 | SEQ ID NO: 261 |
| Mutated truncated protein with 4 mutations 331-332-353-472 (1-515) | SEQ ID NO: 264 | SEQ ID NO: 263 |
| Mutated truncated protein with 15 mutations +9 aa without signal peptide (20-515) | SEQ ID NO: 266 | SEQ ID NO: 265 |
| Mutated truncated protein with 14 mutations (331) without signal peptide (20-515) | SEQ ID NO: 268 | SEQ ID NO: 267 |
| Mutated truncated protein with 14 mutations (332) without signal peptide (20-515) | SEQ ID NO: 270 | SEQ ID NO: 269 |
| Mutated truncated protein with 14 mutations (353) without signal peptide (20-515) | SEQ ID NO: 272 | SEQ ID NO: 271 |
| Mutated truncated protein with 14 mutations (472) without signal peptide (20-515) | SEQ ID NO: 274 | SEQ ID NO: 273 |
| Mutated truncated protein with 13 mutations (331-332) without signal peptide (20-515) | SEQ ID NO: 276 | SEQ ID NO: 275 |
| Mutated truncated protein with 13 mutations (331-353) without signal peptide (20-515) | SEQ ID NO: 278 | SEQ ID NO: 277 |
| Mutated truncated protein with 13 mutations (331-472) without signal peptide (20-515) | SEQ ID NO: 280 | SEQ ID NO: 279 |
| Mutated truncated protein with 13 mutations (332-353) without signal peptide (20-515) | SEQ ID NO: 282 | SEQ ID NO: 281 |
| Mutated truncated protein with 13 mutations (332-472) without signal peptide (20-515) | SEQ ID NO: 284 | SEQ ID NO: 283 |
| Mutated truncated protein with 13 mutations (353-472) without signal peptide (20-515) | SEQ ID NO: 286 | SEQ ID NO: 285 |
| Mutated truncated protein with 12 mutations (331-332-353) without signal peptide (20-515) | SEQ ID NO: 288 | SEQ ID NO: 287 |
| Mutated truncated protein with 12 mutations (331-332-472) without signal peptide (20-515) | SEQ ID NO: 290 | SEQ ID NO: 289 |
| Mutated truncated protein with 12 mutations (331-353-472) without signal peptide (20-515) | SEQ ID NO: 292 | SEQ ID NO: 291 |
| Mutated truncated protein with 12 mutations (332-353-472) without signal peptide (20-515) | SEQ ID NO: 294 | SEQ ID NO: 293 |
| Mutated truncated protein with 11 mutations (331-332-353-472) without signal peptide (20-515) | SEQ ID NO: 296 | SEQ ID NO: 295 |
| Mutated truncated protein with 1 mutation 331 without signal peptide (20-515) | SEQ ID NO: 298 | SEQ ID NO: 297 |
| Mutated truncated protein with 1 mutation 332 without signal peptide (20-515) | SEQ ID NO: 300 | SEQ ID NO: 299 |
| Mutated truncated protein with 1 mutation 353 without signal peptide (20-515) | SEQ ID NO: 302 | SEQ ID NO: 301 |
| Mutated truncated protein with 1 mutation 472 without signal peptide (20-515) | SEQ ID NO: 304 | SEQ ID NO: 303 |
| Mutated truncated protein with 2 mutations 331-332 without signal peptide (20-515) | SEQ ID NO: 306 | SEQ ID NO: 305 |
| Mutated truncated protein with 2 mutations 331-353 without signal peptide (20-515) | SEQ ID NO: 308 | SEQ ID NO: 307 |
| Mutated truncated protein with 2 mutations 331-472 without signal peptide (20-515) | SEQ ID NO: 310 | SEQ ID NO: 309 |
| Mutated truncated protein with 3 mutations 331-332-353 without signal peptide (20-515) | SEQ ID NO: 312 | SEQ ID NO: 311 |
| Mutated truncated protein with 3 mutations 331-332-472 without signal peptide (20-515) | SEQ ID NO: 314 | SEQ ID NO: 313 |
| Mutated truncated protein with 3 mutations 331-353-472 without signal peptide (20-515) | SEQ ID NO: 316 | SEQ ID NO: 315 |
| Mutated truncated protein with 4 mutations 331-332-353-472 without signal peptide (20-515) | SEQ ID NO: 318 | SEQ ID NO: 317 |
| Mutated truncated protein with 15 mutations +9 aa without signal peptide (32-515) | SEQ ID NO: 320 | SBQ ID NO: 319 |
| Mutated truncated protein with 14 mutations (331) without signal peptide (32-515) | SEQ ID NO: 322 | SEQ ID NO: 321 |
| Mutated truncated protein with 14 mutations (332) without signal peptide (32-515) | SEQ ID NO: 324 | SEQ ID NO: 323 |
| Mutated truncated protein with 14 mutations (353) without signal peptide (32-515) | SEQ ID NO: 326 | SEQ ID NO: 325 |
| Mutated truncated, proteia with 14 mutations (472) without signal peptide (32-515) | SEQ ID NO: 328 | SEQ ID NO: 327 |
| Mutated truncated protein with 13 mutations (331-332) without signal peptide (32-515) | SEQ ID NO: 330 | SEQ ID NO: 329 |
| Mutated truncated protein with 13 mutations (331-353) without signal peptide (32-515) | SEQ ID NO: 332 | SEQ ID NO: 331 |
| Mutated truncated protein with 13 mutations (331-472) without signal peptide (32-515) | SEQ ID NO: 334 | SEQ ID NO: 333 |
| Mutated truncated protein with 13 mutations (332-353) without signal peptide (32-515) | SEQ ID NO: 336 | SEQ ID NO: 335 |
| Mutated truncated protein with 13 mutations (332-472) without signal peptide (32-515) | SEQ ID NO: 338 | SEQ ID NO: 337 |
| Mutated truncated protein with 13 mutations (353-472) without signal peptide (32-515) | SEQ ID NO: 340 | SEQ ID NO: 339 |
| Mutated truncated protein with 12 mutations (331-332-353) without signal peptide (32-515) | SEQ ID NO: 342 | SEQ ID NO: 341 |
| Mutated truncated protein with 12 mutations (331-332-472) without signal peptide (32-515) | SEQ ID NO: 344 | SEQ ID NO: 343 |
| Mutated truncated protein with 12 mutations (331-353-472) without signal peptide (32-515) | SEQ ID NO: 346 | SEQ ID NO: 345 |
| Mutated truncated protein with 12 mutations (332-353-472) without signal peptide (32-515) | SEQ ID NO: 348 | SEQ ID NO: 347 |
| Mutated truncated protein with 11 mutations (331-332-353-472) without signal peptide (32-515) | SEQ ID NO: 350 | SEQ ID NO: 349 |
| Mutated truncated protein with 1 mutation 331 without signal peptide (32-515) | SEQ ID NO: 352 | SEQ ID NO: 351 |
| Mutated truncated protein with 1 mutation 332 without signal peptide (32-515) | SEQ ID NO: 354 | SEQ ID NO: 353 |
| Mutated truncated protein with 1 mutation 353 without signal peptide (32-515) | SEQ ID NO: 356 | SEQ ID NO: 355 |
| Mutated truncated protein with 1 mutation 472 without signal peptide (32-515) | SEQ ID NO: 358 | SEQ ID NO: 357 |
| Mutated truncated protein with 2 mutations 331-332 without signal peptide (32-515) | SEQ ID NO: 360 | SEQ ID NO: 359 |
| Mutated truncated protein with 2 mutations 331-353 without signal peptide (32-515) | SEQ ID NO: 362 | SEQ ID NO: 361 |
| Mutated truncated protein with 2 mutations 331-472 without signal peptide (32-515) | SEQ ID NO: 364 | SEQ ID NO: 363 |
| Mutated truncated protein with 3 mutations 331-332-353 without signal peptide (32-515) | SEQ ID NO: 366 | SEQ ID NO: 365 |
| Mutated truncated protein with 3 mutations 331-332-472 without signal peptide (32-515) | SEQ ID NO: 368 | SEQ ID NO: 367 |
| Mutated truncated protein with 3 mutations 331-353-472 without signal peptide (32-515) | SEQ ID NO: 370 | SEQ ID NO: 369 |
| Mutated truncated protein with 4 mutations 331-332-353-472 without signal peptide (32-515) | SEQ ID NO: 372 | SEQ ID NO: 371 |
| Mutated truncated protein with 15 mutations +9 aa (1-477) | SEQ ID NO: 374 | SEQ ID NO: 373 |
| Mutated truncated protein with 14 mutations (13) +9 aa (1-477) | SEQ ID NO: 376 | SEQ ID NO: 375 |
| Mutated truncated protein with 14 mutations (331) (1-477) | SEQ ID NO: 378 | SEQ ID NO: 377 |
| Mutated truncated protein with 14 mutations (332) (1-477) | SEQ ID NO: 380 | SEQ ID NO: 379 |
| Mutated truncated protein with 14 mutations (353) (1-477) | SEQ ID NO: 382 | SEQ ID NO: 381 |
| Mutated truncated protein with 14 mutations (472) (1-477) | SEQ ID NO: 384 | SEQ ID NO: 383 |
| Mutated truncated protein with 13 mutations (331-332) (1-477) | SEQ ID NO: 386 | SEQ ID NO: 385 |
| Mutated truncated protein with 13 mutations (331-353) (1-477) | SEQ ID NO: 388 | SEQ ID NO: 387 |
| Mutated truncated protein with 13 mutations (331-472) (1-477) | SEQ ID NO: 390 | SEQ ID NO: 389 |
| Mutated truncated protein with 13 mutations (332-353) (1-477) | SEQ ID NO: 392 | SEQ ID NO: 391 |
| Mutated truncated protein with 13 mutations (332-472) (1-477) | SEQ ID NO: 394 | SEQ ID NO: 393 |
| Mutated truncated protein with 13 mutations (353-472) (1-477) | SEQ ID NO: 396 | SEQ ID NO: 395 |
| Mutated truncated protein with 12 mutations (331-332-353) (1-477) | SEQ ID NO: 398 | SEQ ID NO: 397 |
| Mutated truncated protein with 12 mutations (331-332-472) (1-477) | SEQ ID NO: 400 | SEQ ID NO: 399 |
| Mutated truncated protein with 12 mutations (331-353-472) (1-477) | SEQ ID NO: 402 | SEQ ID NO: 401 |
| Mutated truncated protein with 12 mutations (332-353-472) (1-477) | SEQ ID NO: 404 | SEQ ID NO: 403 |
| Mutated truncated protein with 11 mutations (331-332-353-472) (1-477) | SEQ ID NO: 406 | SEQ ID NO: 405 |
| Mutated truncated protein with 13 mutations (13-353) (1-477) | SEQ ID NO: 408 | SEQ ID NO: 407 |
| Mutated truncated protein with 12 mutations (13-331-353) (1-477) | SEQ ID NO: 410 | SEQ ID NO: 409 |
| Mutated truncated protein with 12 mutations (13-331-472) (1-477) | SEQ ID NO: 412 | SEQ ID NO: 411 |
| Mutated truncated protein with 12 mutations (13-332-353) (1-477) | SEQ ID NO: 414 | SEQ ID NO: 413 |
| Mutated truncated protein with 12 mutations (13-332-472) (1-477) | SEQ ID NO: 416 | SEQ ID NO: 415 |
| Mutated truncated protein with 12 mutations (13-353-472) (1-477) | SEQ ID NO: 418 | SEQ ID NO: 417 |
| Mutated truncated protein with 11 mutations (13-331-332-353) (1-477) | SEQ ID NO: 420 | SEQ ID NO: 419 |
| Mutated truncated protein with 11 mutations (13-331-332-472) (1-477) | SEQ ID NO: 422 | SEQ ID NO: 421 |
| Mutated truncated protein with 11 mutations (13-331-353-472) (1-477) | SEQ ID NO: 424 | SEQ ID NO: 423 |
| Mutated truncated protein with 11 mutations (13-332-353-472) (1-477) | SEQ ID NO: 426 | SEQ ID NO: 425 |
| Mutated truncated protein with 10 mutations (13-331-332-353-472) (1-477) | SEQ ID NO: 428 | SEQ ID NO: 427 |
| Mutated truncated protein with 1 mutation 331 (1-477) | SEQ ID NO: 430 | SEQ ID NO: 429 |
| Mutated truncated protein with 1 mutation 332 (1-477) | SEQ ID NO: 432 | SEQ ID NO: 431 |
| Mutated truncated protein with 1 mutation 353 (1-471) | SEQ ID NO: 434 | SEQ ID NO: 433 |
| Mutated truncated protein with 1 mutation 472 (1-477) | SEQ ID NO: 436 | SEQ ID NO: 435 |
| Mutated truncated protein with 2 mutations 331-332 (1-477) | SEQ ID NO: 438 | SEQ ID NO: 437 |
| Mutated truncated protein with 2 mutations 331-353 (1-477) | SEQ ID NO: 440 | SEQ ID NO: 439 |
| Mutated truncated protein with 2 mutations 331-472 (1-477) | SEQ ID NO: 442 | SEQ ID NO: 441 |
| Mutated truncated protein with 3 mutations 331-332-353 (1-477) | SEQ ID NO: 444 | SEQ ID NO: 443 |
| Mutated truncated protein with 3 mutations 331-332-472 (1-477) | SEQ ID NO: 446 | SEQ ID NO: 445 |
| Mutated truncated protein with 3 mutations 331-353-472 (1-477) | SEQ ID NO: 448 | SEQ ID NO: 447 |
| Mutated truncated protein with 4 mutations 331-332-353-472 (1-477) | SEQ ID NO: 450 | SEQ ID NO: 449 |
| Mutated truncated protein with 15 mutations +9 aa without signal peptide (20-477) | SEQ ID NO: 452 | SEQ ID NO: 451 |
| Mutated truncated protein with 14 mutations (331) without signal peptide (20-477) | SEQ ID NO: 454 | SEQ ID NO: 453 |
| Mutated truncated protein with 14 mutations (332) without signal peptide (20-477) | SEQ ID NO: 456 | SEQ ID NO: 455 |
| Mutated truncated protein with 14 mutations (353) without signal peptide (20-477) | SEQ ID NO: 458 | SEQ ID NO: 457 |
| Mutated truncated protein with 14 mutations (472) without signal peptide (20-477) | SEQ ID NO: 460 | SEQ ID NO: 459 |
| Mutated truncated protein with 13 mutations (331-332) without signal peptide (20-477) | SEQ ID NO: 462 | SEQ ID NO: 461 |
| Mutated truncated protein with 13 mutations (331-353) without signal peptide (20-477) | SEQ ID NO: 464 | SEQ ID NO: 463 |
| Mutated truncated protein with 13 mutations (331-472) without signal peptide (20-477) | SEQ ID NO: 466 | SEQ ID NO: 465 |
| Mutated truncated protein with 13 mutations (332-353) without signal peptide (20-477) | SEQ ID NO: 468 | SEQ ID NO: 467 |
| Mutated truncated protein with 13 mutations (332-472) without signal peptide (20-477) | SEQ ID NO: 470 | SEQ ID NO: 469 |
| Mutated truncated protein with 13 mutations (353-472) without signal peptide (20-477) | SEQ ID NO: 472 | SEQ ID NO: 471 |
| Mutated truncated protein with 12 mutations (331-332-353) without signal peptide (20-477) | SEQ ID NO: 474 | SEQ ID NO: 473 |
| Mutated truncated protein with 12 mutations (331-332-472) without signal peptide (20-477) | SEQ ID NO: 476 | SEQ ID NO: 475 |
| Mutated truncated protein with 12 mutations (331-353-472) without signal peptide (20-477) | SEQ ID NO: 478 | SEQ ID NO: 477 |
| Mutated truncated protein with 12 mutations (332-353-472) without signal peptide (20-477) | SEQ ID NO: 480 | SEQ ID NO: 479 |
| Mutated truncated protein with 11 mutations (331-332-353-472) without signal peptide (20-477) | SEQ ID NO: 482 | SEQ ID NO: 481 |
| Mutated truncated protein with 1 mutation 331 without signal peptide (20-477) | SEQ ID NO: 484 | SEQ ID NO: 483 |
| Mutated truncated protein with 1 mutation 332 without signal peptide (20-477) | SEQ ID NO: 486 | SEQ ID NO: 485 |
| Mutated truncated protein with 1 mutation 353 without signal peptide (20-477) | SEQ ID NO: 488 | SEQ ID NO: 487 |
| Mutated truncated protein with 1 mutation 472 without signal peptide (20-477) | SEQ ID NO: 490 | SEQ ID NO: 489 |
| Mutated truncated protein with 2 mutations 331-332 without signal peptide (20-477) | SEQ ID NO: 492 | SEQ ID NO: 491 |
| Mutated truncated protein with 2 mutations 331-353 without signal peptide (20-477) | SEQ ID NO: 494 | SEQ ID NO: 493 |
| Mutated truncated protein with 2 mutations 331-472 without signal peptide (20-477) | SEQ ID NO: 496 | SEQ ID NO: 495 |
| Mutated truncated protein with 3 mutations 331-332-353 without signal peptide (20-477) | SEQ ID NO: 498 | SEQ ID NO: 497 |
| Mutated truncated protein with 3 mutations 331-332-472 without signal peptide (20-477) | SEQ ID NO: 500 | SEQ ID NO: 499 |
| Mutated truncated protein with 3 mutations 331-353-472 without signal peptide (20-477) | SEQ ID NO: 502 | SEQ ID NO: 501 |
| Mutated truncated protein with 4 mutations 331-332-353-472 without signal peptide (20-477) | SEQ ID NO: 504 | SEQ ID NO: 503 |
| Mutated truncated protein with 15 mutations +9 aa without signal peptide (32-477) | SEQ ID NO: 506 | SEQ ID NO: 505 |
| Mutated truncated protein with 14 mutations (331) without signal peptide (32-477) | SEQ ID NO: 508 | SEQ ID NO: 507 |
| Mutated truncated protein with 14 mutations (332) without signal peptide (32-477) | SEQ ID NO: 510 | SEQ ID NO: 509 |
| Mutated truncated protein with 14 mutations (353) without signal peptide (32-477) | SEQ ID NO: 512 | SEQ ID NO: 511 |
| Mutated truncated protein with 14 mutations (472) without signal peptide (32-477) | SEQ ID NO: 514 | SEQ ID NO: 513 |
| Mutated truncated protein with 13 mutations (331-332) without signal peptide (32-477) | SEQ ID NO: 516 | SEQ ID NO: 515 |
| Mutated truncated protein with 13 mutations (331-353) without signal peptide (32-477) | SEQ ID NO: 518 | SEQ ID NO: 517 |
| Mutated truncated protein with 13 mutations (331-472) without signal peptide (32-477) | SEQ ID NO: 520 | SEQ ID NO: 519 |
| Mutated truncated protein with 13 mutations (332-353) without signal peptide (32-477) | SEQ ID NO: 522 | SEQ ID NO: 521 |
| Mutated truncated protein with 13 mutations (332-472) without signal peptide (32-477) | SEQ ID NO: 524 | SEQ ID NO: 523 |
| Mutated truncated protein with 13 mutations (353-472) without signal peptide (32-477) | SEQ ID NO: 526 | SEQ ID NO: 525 |
| Mutated truncated protein with 12 mutations (331-332-353) without signal peptide (32-477) | SEQ ID NO: 528 | SEQ ID NO: 527 |
| Mutated truncated protein with 12 mutations (331-332-472) without signal peptide (32-477) | SEQ ID NO: 530 | SEQ ID NO: 529 |
| Mutated truncated protein with 12 mutations (331-353-472) without signal peptide (32-477) | SEQ ID NO: 532 | SEQ ID NO: 531 |
| Mutated truncated protein with 12 mutations (332-353-472) without signal peptide (32-477) | SEQ ID NO: 534 | SEQ ID NO: 533 |
| Mutated truncated protein with 11 mutations (331-332-353-472) without signal peptide (32-477) | SEQ ID NO: 536 | SEQ ID NO: 535 |
| Mutated truncated protein with 1 mutation 331 without signal peptide (32-477) | SEQ ID NO: 538 | SEQ ID NO: 537 |
| Mutated truncated protein with 1 mutation 332 without signal peptide (32-477) | SEQ ID NO: 540 | SEQ ID NO: 539 |
| Mutated truncated protein with 1 mutation 353 without signal peptide (32-477) | SEQ ID NO: 542 | SEQ ID NO: 541 |
| Mutated truncated protein with 1 mutation 472 without signal peptide (32-477) | SEQ ID NO: 544 | SEQ ID NO: 543 |
| Mutated truncated protein with 2 mutations 331-332 without signal peptide (32-477) | SEQ ID NO: 546 | SEQ ID NO: 545 |
| Mutated truncated protein with 2 mutations 331-353 without signal peptide (32-477) | SEQ ID NO: 548 | SEQ ID NO: 547 |
| Mutated truncated protein with 2 mutations 331-472 without signal peptide (32-477) | SEQ ID NO: 550 | SEQ ID NO: 549 |
| Mutated truncated protein with 3 mutations 331-332-353 without signal peptide (32-477) | SEQ ID NO: 552 | SEQ ID NO: 551 |
| Mutated truncated protein with 3 mutations 331-332-472 without signal peptide (32-477) | SEQ ID NO: 554 | SEQ ID NO: 553 |
| Mutated truncated protein with 3 mutations 331-353-472 without signal peptide (32-477) | SEQ ID NO: 556 | SEQ ID NO: 555 |
| Mutated truncated protein with 4 mutations 331-332-353-472 without signal peptide (32-477) | SEQ ID NO: 558 | SEQ ID NO: 557 |

[0408] The invention described above is explained and illustrated, but not limited to, by the following examples and the following figures.

### FIGURES

[0409] FIG. 1A corresponds to a proliferation test of smooth muscular cells from aorta. The x-axis represents the concentration in ng/ml of the protein netrin 4 or of the mutated netrin 4 of the invention and the y-axis represents the proliferation percentage. The left curve with black circles corresponds to the mutated netrin 4, and the right curve with black triangles corresponds to the native netrin 4.

[0410] FIG. 1B corresponds to a migration test of smooth muscular cells from aorta. The cells are counted in 8 high power fields (hpf) and the mean and the standard deviation are indicated on the y-axis. The x-axis represents the concentration in ng/ml of the protein netrin 4 or of the mutated netrin 4 of the invention. The curve with squares corresponds to the mutated netrin 4, and the curve with diamonds corresponds to the netrin 4.

[0411] FIG. 2 corresponds to a proliferation test of HUAEC cells in order to determine the effect of supernatants of PC3 cells, said cells being transfected with the mutated netrin 4 of the invention (clones 1, and 5) or with the native netrin 4 (clones 8, 10, and 15). The y-axis represents the proliferation percentage. Column 1 is the control (DMEM alone); column 2 corresponds to non-transfected PC3 cells; column 3 corresponds to clone 1; column 4 corresponds to clone 5; column 5 corresponds to clone 8; column 6 corresponds to clone 10; column 7 corresponds to clone 15.

[0412] FIG. 3A corresponds to an analysis of the tumor progression. The x-axis corresponds to the time in days, j=0 being the day where the tumor graft is carried out. The y-axis corresponds to the tumor volumes (in mm³). The curve with diamonds corresponds to the non-transfected PC3 cells; the curve with squares corresponds to PC3 cells transfected with clone 1; and the curve with triangles corresponds to PC3 ells transfected with clone 5. FIG. 3B represents the ratio of Ki67 positive cells (proliferative cells) to CD 31 positive cells (endothelial cells). The left column corresponds to the non-transfected PC3 cells; the middle column corresponds to PC3 cells transfected with clone 1; and the right column corresponds to PC3 cells transfected with clone 5. FIG. 3C corresponds to the ratio of desmin positive cells (pericytes) to CD 31 positive cells (endothelial cells). The left column corresponds to the non-transfected PC3 cells; the middle column corresponds to PC3 cells transfected with clone 1; and the right column corresponds to PC3 ells transfected with clone 5.

[0413] FIGS. 4A and 4B represent the analysis of the tumor progression of colon carcinoma LS174 cells either untransfected (nt)(FIG. 4A) or transfected with a vector carrying the full sequence of mutated NET-4m (transfected clone FS3)(FIG. 4B) in the presence of AVASTIN®. The y-axis represents the tumor volume (in mm³) and the x-axis the time (in days) after the inoculation of cancer cells xenografts. At day 12, when the average mean tumor volume reached 400 mm³, Avastin was injected intraperitoneally at a dose of 50 μg/injection. The curves with squares correspond to un-treated tumor cells and the curves with diamonds correspond to AVASTIN-treated tumor cells.

[0414] FIGS. 5A, 5B, and 5C correspond to the perfusion of a fluorescent dextran to visualize choroid neo-vessels around a laser impact in grey in the centre. The rats received two or three laser impacts at D (days)=0, and then at D=7, D=10 they received a subretinal injection of the vehicle alone (PBS) (5A) or 2 μg of netrin 4 (5B) or 100 pg of mutated netrin 4 (5C). At D=14, the rats are sacrificed and perfused by the fluorescent lectine to visualize the choroid neo-vessels that can be seen on said figures in white and that surrounding a laser impact in grey.

[0415] FIG. 6 represents a migration test of smooth muscular cells from aorta with the presence of deletion mutants of the mutated netrin 4. The cells are counted in 8 hpf and the mean and the standard deviation are represented on the y-axis. The x-axis corresponds to the concentration of the conditioned medium in μg/ml. The curve with the diamonds corresponds to the medium conditioned with cells transfected with a full sequence of mutated netrin 4 (NET-4m); the curve with the squares corresponds to the medium conditioned with cells transfected with NET-4m AEGF; and the curve with the triangles corresponds to the medium conditioned with cells transfected with NET-4m ΔCter (aa1-477).

[0416] FIG. 7 represents the results of a matrigel assay for the mutated netrin 4 (N4m) of the invention. Netrin 4 and NET-4m inhibit VEGF- and FGF-2-induced dermal angiogenesis. 300 μl matrigel pellets were mixed with 100 ng of VEGF and FGF-2 in the presence of 2 μg of netrin 4 (N4) or 1 ng of N4m or in the absence of N4 or N4m (column “C”) and then injected subcutaneously into the flanks of C57/B16 mice. After 7 days, mice were killed, pellets were recovered and their hemoglobin content was measured (y-axis: hemoglobin in mg/mg Matrigel).

[0417] FIG. 8A represents the mean daily increase of carcinomatosis score. The y-axis is the daily score of Sugerbaker for LS174 and FS 3 tumors.

[0418] FIG. 8B represents the ascites volume in ml for FS 3 and LS174 tumors.

[0419] FIG. 8C represents the endocavital face of peritoneum in FS3 and LS174 injected mice.

[0420] FIG. 9 represents the analysis of the tumor progression of PC3 cells transfected or not. The y-axis represents the tumor volume (in mm³) and the x axis the time (in days). The curve with diamonds corresponds to the PC3 cells; the curve with squares corresponds to the injection of pericytes to nude mice bearing a tumor derived from PC3 cells; the curve with triangles corresponds to PC3 cells transfected with mutated netrin-4, and the curve with crosses corresponds to the injection of pericytes.

[0421] FIG. 10 corresponds to the perfusion of a fluorescent dextran to visualize choroid neo-vessels around a laser impact. The mice received two laser impacts at day D(days)=0, and then at D=7, D=10 they received a subretinal injection of the vehicle alone (PBS) or 100 pg of NET-4m Delta C or 20 pg of NET-4m. At day 14 the mice are sacrificed and perfused by the fluorescent lectin to visualize the choroid neo-vessels. The staining of fluorescent dextran was then analysed by adobe photoshop and quantified as the mean of 8-12 laser impact areas.

[0422] The white column corresponds to Buffer; the black column corresponds to DeltaC NET-4m purified from transfected CHO cells; the gray column corresponds to NET-4m purified from CHO transfected cells.

[0423] FIG. 11 corresponds to an analysis of the tumor progression. The y-axis corresponds to the tumor percentage of control. The column 1 corresponds to the non-transfected LS174 cells; the column 2 corresponds to LS174 cells transfected with clone FS2; the column 3 corresponds to LS174 cells transfected with clone FS3; the column 4 corresponds to LS174 cells transfected with clone DeltaC1; the column 5 corresponds to LS174 cells transfected with clone DeltaC2.

### EXPERIMENTAL PART

[0424] Materials:

[0425] The molecules netrin 4 (SEQ ID NO: 2), and the mutated netrin 4 (NET4m) (SEQ ID NO: 6) are recombinant proteins. The molecule netrin 4 is available by R&D.

[0426] The isoform of 165 amino acids of VEGF is produced by the infection of insect cells SF9 by a recombinant baculovirus containing the corresponding cDNA (Plouët J, Moro F, Coldeboeuf N, Bertagnolli S, Clamens S, Bayard F (1997) Extracellular cleavage of the vascular endothelial growth factor 189 aa form by urokinae is required for its mitogenic activity. J. Biol. Chem., 272, 13390-13396).

[0427] Human umbilical arterial endothelial cells (HUAEC) were isolated from umbilical arteries which were perfused with collagenase (Sigma) to digest the basal membrane. HUAEC cells were maintained in EBM medium (Clonetics), to which 15% of heat-inactivated foetal calf serum (FCS), 100 μg/ml of penicillin, and 100 μg/ml of streptomycin at 37° C. in 5% CO₂ were added. The stem cultures received 2 ng/ml of VEGF at each even day.

[0428] Smooth muscular cells from aorta were maintained in DMEM medium to which 15% of heat-inactivated foetal calf serum (FCS), 100 μg/ml of penicillin, and 100 μg/ml of streptomycin at 37° C. in 5% CO₂ were added. The stem cultures received 2 ng/ml of FGF-2 every other day.

[0429] Identification of a Mutated Netrin 4

[0430] Cloning of the Mutated Netrin 4

[0431] Total RNA of cells of the artery of human umbilical cord (HUAEC) were extracted with TriPure (Roche). Then the RNAs were transcribed by using the RT-PCR kit (AMV) of Roche according the manufacturer's indications.

[0432] Primers (5′)-TT CTA GAC ATG GGG AGC TGC GCG CGG-(3′) (sense) and (5′)—C ATT AAC GTC GAA CTG ACA GGT ATC-(3′) (antisense) were used for the amplification of the sequence 1-1039 of the netrin 4, while the primers (5′)-AG CAC TGT GCC CCG TTA TAC AAT GA-(3′) (sense) and (5′)-CGG GAT CCA CTT GCA CTC TCT TTT TAA AAT ATC C-(3′) (antisense) were used for the amplification of the sequence 914-1884 of the netrin 4.

[0433] The conditions for the amplification were: 35 cycles with denaturation at 94° C. for 1 minute; hybridization at 55° C. for 1 minute; and extension at 72° C. for 1 minute.

[0434] The products as obtained were mixed and used for a new PCR with the primers (5′)-TT CTA GAC ATG GGG AGC TGC GCG CGG-(3′) (sense), and (5′)—CGG GAT CCA CTT GCA CTC TCT TTT TAA AAT ATC C-(3′) (antisense) in the same conditions as described previously, with 25 cycles instead of 35. This PCR product containing the whole sequence of the netrin 4 was cloned in the intermediary vector pCR2.1 (Invitrogen). After the digestion by Xba I and Bam HI, the sequence of the netrin 4 was extracted from this vector and inserted into the pcDNA3.1 (−)/His myc C vector, said vector being digested by the same restriction enzymes. This last vector that contains the whole sequence of the mutated netrin 4 was used to transfect cells. An identical manipulation has led to the obtaining of an expression vector of the wild netrin 4 by using the sequence of the wild netrin 4.

[0435] The mutated netrin 4 was produced by the transfection of pgsA 745 CHO cells with the vector containing the sequence of the wild netrin 4 according to the protocol as described in: Plouët J, Moro F, Coldeboeuf N, Bertagnolli S, Clamens S, Bayard F (1997) Extracellular cleavage of the vascular endothelial growth factor 189-amino acid form by urokinase is required for its mitogenic activity. J. Biol. Chem., 272, 13390-13396. The protein was purified by heparin-sepharose affinity chromatography and eluted with a discontinuous gradient of NaCl (0.3, 1.0, and 2.0 M NaCl). The mutated netrin 4 of the invention (NET 4m) is eluted with NaCl 2M, and it has a purity degree higher than 90%.

[0436] The biological activity of the mutated netrin 4 (NET 4m) was compared to the activity of the wild netrin 4 (NET 4) according to the proliferation test of the smooth muscular cells. FIG. 1A shows that NET 4m triggers a mitogenic activity at a concentration that is 1,000-fold less than the one of NET 4. Similarly, in a migration test, NET-4 m is 1,000-fold more active than NET-4 (see FIG. 1B).

[0437] Construction of Deletion Mutants for the Mutated Netrin 4

[0438] The vector pcDNA3.1 (−)/His myc C containing the whole sequence of the mutated netrin 4 (628 amino acids) was digested by the restriction enzyme BamH1, treated with the fragment klenow of the polymerase 1, then digested with the restriction enzyme PshA1. The linearized fragment that corresponds to the vector pcDNA3.1 (−)/His myc C containing the sequence of the mutated netrin 4 from which the Cter domain (478-628) was deleted was then isolated after migration on agarose gel and is purified on a Qiagen column. After ligation, an expression vector pcDNA3.1 (−)/His myc C containing the sequence of the mutated netrin 4 from which the Cter domain was deleted (1-477) was obtained. The vector pcDNA3.1 (−)/His myc C containing the whole sequence of the mutated netrin 4 (628 aa) was digested by the restriction enzyme Xcml. This enzyme that cuts the internal sequence of the netrin 4 in two sites (aa288/aa488) enables the deletion of the central domain of the protein (domain V with EGF motifs). After the purification and the ligation of the fragment, an expression vector pcDNA3.1 (−)/His myc C containing the sequence of the mutated netrin 4 from which the central domain was deleted (288/488) was obtained. However as the ligation of both sites Xcml leads to the onset of a stop codon (aa 313), this vector codes for a mutated netrin 4 that is truncated of 312 amino acids and that contains the sequence of the laminin domain (1-288) and a protein sequence of 24 amino acids.

[0439] Production of Anti-Idiotypic Antibodies

[0440] Firstly, a neutralizing antibody of the mutated netrin 4 of the invention or of a truncated form of said mutated netrin 4 (SEQ ID NO: 80 to 558) was prepared by injecting to an animal, in particular a mouse, said mutated netrin or said fragment in admixture with Freund's complete adjuvant (1 volume for a volume of netrin or netrin fragment). A quantity of mutated netrin or netrin fragment varying from 10 to 500 μg/kg of body weight was used to immunize the animal. The same procedure was carried out after 15 and 30 days, except that the complete adjuvant was replaced by incomplete adjuvant. At day 40 the animals were bled, the serum was separated, and the immunoglobulins were purified by any usual fractionation method, in particular ammonium sulphate precipitation, protein A- or protein G-affinity chromatography. The neutralizing activity of the immunoglobulins was measured by any described test (for an example, for the mutated netrin 4 of the invention or one of its fragments: bonding of labelled netrin 4 to the extracellular domain of any one of its receptors, proliferation, migration, cell adhesion). Thus a group of immunoglobulins was considered as neutralizing when it was able to inhibit the interaction of the mutated netrin 4 either with the extracellular domain of dcc, neogenin, UNC5A, UNC5B, UNC5C or UNC5D.

[0441] Then anti-idiotypic antibodies of the mutated netrin 4 or of one of its fragments were prepared by injecting to mice by subcutaneous route 1 to 100 μg of the preparation of the immunoglobulins that neutralize the activity of said mutated netrin or said fragment as described previously, in association with 100 μl of adjuvant, in particular of Freund's complete adjuvant (Sigma). The injection was repeated 15, 30, and 45 days later. Fifty five days after the first injection, 10 μg of the same antibody were injected to mice by intraperitoneal route. Fifty eight days after the first injection, the mice were bled and their spleens were sampled and dilacerated in ISCOVE medium in order to release the splenocytes. The splenocytes were fused with mice's myeloma cells, in particular with AG8×63 cells (Kearney J F, Radbruch A, Liesegang B, Rajewsky K (1979) A new mouse myeloma cell line that has lost immunoglobulin expression but permits the construction of antibody-secreting hybrid cell lines. J. Immunol. 123, 1548-50), and were incubated at a ratio of 100,000 cells/well. The fusion was carried out by adding 20 times a volume of 50 μl of polyethylene glycol (PEG) within an interval of 30 seconds. Four ml of 37° C.-preheated ISCOVE medium were then added dropwise to the cell suspension, and then, after an incubation time of 4 minutes at 37° C., 4 ml were added. The cell suspension was centrifuged then the cell centrifugation pellet was resuspended in 100 ml of ISCOVE medium complemented with 20% of foetal calf serum and HAT 1× (50×: Hypoxanthine 5 mM, Aminopterin 20 μM and Thymidine 0.8 mM) and distributed at a volume of 100 μl per well on macrophages. After 5 days, 100 μl of HAT medium were added, and after 8 to 14 days, the conditioned medium of each hybridoma was sampled to measure by ELISA the antibodies that were directed against the antibodies used as immunogenic agents, that is to say the anti-netrin antibodies. The activity of the anti-idiotypic antibodies was then measured by an ELISA test.

[0442] The Fab fragments of the anti-mutated netrin 4, prepared by any usual technique, in particular by papain digestion, were immobilized on microtitration plates (0.1-20 μg/ml in carbonate buffer 50 mM pH 9.6). After saturation of the non-specific sites by a solution of albumin serum diluted at 5 mg/ml in the same buffer, the supernatants of hybridomas cultures were added as half-diluted in PBS buffer (phosphate buffer) containing 0.05% Tween 20. After rinses, the anti-idiotypic antibodies were revealed by the addition of an appropriate concentration of mice peroxydase-coupled anti-Fc antibodies. The amount of fixed anti-idiotypic antibodies was then measured by revelation of the peroxydase and was proportional to the intensity of the colorimetric reaction.

[0443] The hybridomas were selected according to their ability to secrete antibodies against anti-mutated netrin 4 antibodies, and these selected hybridomas were then cloned: more precisely, the cells were grown in limit dilution condition (5 cells/ml) in a volume of 0.1 ml per well. The medium was changed after 10 days. After 15 days, some of the wells contained cell groups that grew from the starting cell, and these cells thus were identical and originated from the same clone. When the surface that was covered by the cells was at least half of the total surface of the well, the medium was sampled and analysed.

[0444] A second ELISA test was then carried out: goat immunoglobulins directed against the Fc domains of the human IgG were incubated on microtitration plates (0.1-20 μg/ml in carbonate buffer 50 mM pH 9.6). After saturation of the non-specific sites by a solution of albumin serum diluted at 5 mg/ml in the same buffer, the proteins containing the extracellular domains of the netrins receptors fused to a Fc sequence of human IgG were immobilized on the microtitration plates (incubation at a concentration of 1 to 100 μg/ml). The supernatants of the hybridomas cultures were added as half-diluted in PBS buffer containing 0.05% Tween 20. After rinses, the anti-idiotypic antibodies were revealed by the addition of an appropriate concentration of mice peroxydase-coupled anti-Fc antibodies. The amount of fixed anti-idiotypic antibodies was then measured by revelation of the peroxydase and was proportional to the intensity of the colorimetric reaction.

[0445] As soon as the clones were identified, their monoclonal state was confirmed by the usual procedure that consisted in seeding a 96 wells-plate with cells originating from the same clone and diluted in limit conditions as described previously. The secreting clones should thus secrete an antibody with the same specificity in order to be considered as monoclonal. A third cloning was then carried out exactly in the same conditions to ensure that the clones were monoclonal.

[0446] The monoclonal anti-idiotypic antibodies were screened by a series of tests, in particular by an ELISA test on extracellular domains of the known netrins receptors (dcc, neogenin, UNC5-A, UNC5-B, UNC5-C, UNC5-D), or measurement of the inhibition of the proliferation or migration of HUAEC cells or in vivo measurement tests of an anti-angiogenic activity.

[0447] Thus the anti-idiotypic antibodies were mimes of the netrins domains. The aim was to design an “internal image” of a netrin domain and to obtain an antibody that binds to a netrin receptor but that does not bind to all the receptors. As soon as the specificity was confirmed, the agonist function of this antibody was ascertained by measuring its activity on cells, that is to say by inhibiting the HUAEC functions without inhibiting or stimulating the netrins functions on SMC and/or by stimulating SMC without affecting HUAEC.

[0448] The interest of these antibodies was to be able to mimic a function of the netrins on a cell target without affecting other targets. Thus it would be interesting to stimulate the pericytes functions without inducing the apoptosis of the endothelial cells or to inhibit their migration, their proliferation, their differentiation in some pathologies:
[0449] age-related macular degeneration,
[0450] diabetic retinopathy, at a premature state where the pericytes rarefaction precedes neovascularisation,
[0451] neovascular glaucoma (of the cornea, of the retina . . . ),
[0452] rheumatoid arthritis,
[0453] psoriasis, in particular psoriasis arthritis,
[0454] angioma,
[0455] atherosclerosis,
[0456] obesity,
[0457] cancers.

[0458] Inversely it would be interesting to inhibit the proliferation of endothelial cells without affecting the pericytes for the above-mentioned pathologies.

[0459] Angiogenesis's Inhibition

[0460] In order to increase the specific activity of netrin-4 point mutations were inserted in its sequence and produced various mutants in CHO cells. One of them referred as NET-4m (mutated netrin-4 of the invention; SEQ ID NO: 6) exhibited a 2000-fold gain of function in the matrigel assay (FIG. 7). Neither netrin-4 (NET-4) nor NET-4m had any pro-angiogenic effect in the absence of VEGF and FGF-2. These results disagree with the report by Park (K. W. Park et al., Proc. Natl. Acad. Sci. U.S.A 101, 16210-16215 (2004)) which describes netrin-1 as pro-angiogenic in the corneal angiogenesis assay. This discrepancy might be explained by the fact that netrins have a strong affinity for heparansulfates and thus may displace endogenous FGF-2 from its storage sites in the corneal stroma; a similar phenomenon for VEGF 189 was previously noticed (F. Jonca, N. Ortega, P. E. Gleizes, N. Bertrand, J. Plouet, J. Biol. Chem. 272, 24203-24209 (1997)). Recent evidences demonstrate that corneal vascularization depends of soluble VEGFR-1 expression (B. K. Ambati et al., Nature 443, 993-997 (2006)) which might be by netrins. Although neogenin or Unc5B could not be detected in adult retinas, an increase of their expression was noticed after laser-induced injury (data not shown). Indeed subretinal injections of NET-4m (1 ng), after the onset of angiogenesis, reduced choroid neovascularization, as visualized by dextran perfusion, by more than 70% (FIG. 5C). The PC3 prostatic cancer-derived cell line was used to decipher the potential effect of netrin-4 in tumor angiogenesis. PC3 prostate cancer cell proliferation was not affected by addition of exogenous netrin-4. These cells were then transfected with expression vectors encoding NET-4m and screened the ability of their conditioned medium to inhibit HUAEC proliferation. The proliferation (FIG. 7) and secretion of VEGF (4.5±0.2 ng/10⁶ cells/48 h) by these cells were similar to those of parental cells, so analyzing tumor growth was informative. Two clones and parental cells transfected with the empty vector were grafted into nude mice, and tumor volume recorded. Both the tumor take and the growth curve slope were reduced by netrin-4 constitutive expression Immunohistochemistry analysis showed two major features. First, the overall proliferation index was reduced by 50% in tumors derived from clone 1 and 70% in those from clone 5 with respect to empty vector-transfected cells. Secondly, the number of CD 31-positive cells appeared significantly reduced by netrin-4 overexpression. In addition the number of Desmin-positive cells increased in a parallel fashion tumors, therefore decreasing the ratio CD 31/Desmin to 2 and 3-fold respectively. Unlike cc smooth muscle actin or NG2, Desmin is a marker of mature pericytes (S. Song, A. J. Ewald, W. Stallcup, Z. Werb, G. Bergers, Nat. Cell Biol. 7, 870-879 (2005)). Therefore netrin-4 may inhibit tumor progression by a dual mechanism involving eradication of angiogenic EC (endothelial cells) and stimulation of mature pericytes to cover EC, contributing to control EC proliferation through activation of latent TGF (A. Antonella-Orlidge, K. B. Saunders, S. R. Smith, P. d'Amore Proc Natl Acad Sci USA. 86, 4544-4588 (1989)). Both activities should induce neovessel stabilization. Indeed, this attractive hypothesis (R. K. Jain, Nat Med. 9, 685-693 (2003)) has only been documented by pro-angiogenic withdrawal. These results demonstrate for the first time that altering the balance between pro-angiogenic and anti-angiogenic modulators by increasing the level of endogenous anti-angiogenic factor is a plausible approach to fight tumor angiogenesis.

[0461] In Vitro Angiogenesis

[0462] In vitro angiogenesis assays were performed using HUAEC (10⁵ cells/cm²) seeded on growth factor-reduced Matrigel (BD Biosciences) and incubated at 37° C. for 1 hour. Then 50 ng/ml of VEGF was added, the samples incubated for 2 hours and 400 ng/ml of netrin-1 or netrin-4 was added and incubation continued for 5 more hours. The plates were then rinsed with PBS and fixed at room temperature with 1% glutaraldehyde. The mean microcapillary network was measured using an automated computer-assisted image analysis system, and the total length of the capillaries in each well was determined (μm) for each experimental condition. Experiments were performed in triplicate and repeated at least three times.

[0463] Comparison of the Activity of Net-4 and Net-4m on Proliferation (FIG. 1A) and Migration (FIG. 1B) of the SMC

[0464] Plates with 96 wells were seeded with 2,000 SMC (smooth muscular cells) per well in DMEM medium complemented with 10% FCS. After 6 hours the cells were transferred in DMEM medium containing 2% FCS and were then stimulated (or not) with various concentrations of netrin 4 (NET-4) or of mutated netrin 4 (NET-4m). After 5 days, the wells were rinsed with DMEM and the cells were fixed with 1% glutaldehyde, coloured with violet crystal and solubilized with acetic acid. The optical density was measured at 595 nm. Similar results were obtained in three independent experiments. The indicated values are mean optical densities of 6 wells±standard deviation (SD).

[0465] Proliferation Test of SMC (FIG. 1A)

[0466] The mutated netrin 4 was produced by transfecting pgsA 745 CHO cells with the vector containing the sequence of the wild netrin 4 according to a known procedure (Plouët J, Moro F, Coldeboeuf N, Bertagnolli S, Clamens S, Bayard F (1997) Extracellular cleavage of the vascular endothelial growth factor 189 aa form by urokinae is required for its mitogenic activity. J. Biol. Chem., 272, 13390-13396). The protein was purified by heparin-sepharose affinity chromatography and eluted with a discontinuous gradient of NaCl (0.3, 1.0 and 2.0 M NaCl). NET-4m was eluted with NaCl 2M and has a purity degree greater than 90%.

[0467] The biological activity of NET-4m was compared with the activity of wild NET 4 according to the smooth muscular cells proliferation test. FIG. 1A shows that half of the maximal stimulation was obtained with a concentration of 120 ng/ml of non-mutated netrin 4 (NET-4) and 0.1 ng/ml of mutated netrin 4 (NET-4m). This means that the mitogenic activity of the mutated netrin 4 is thousand times as active as the non-mutated netrin 4.

[0468] Migration Test of the SMC (FIG. 1B)

[0469] The confluent monolayer of SMC is incubated during one night in the presence of DMEM. A wound is made in the monolayer with a rubber policeman and the wells were washed three times with DMEM and then incubated in the presence of varying concentrations of netrin 4 (NET-4) or mutated netrin 4 (NET-4m). After 24 hours, the wells were washed three times and coloured with May-Grunwald-Giemsa and photographed and the cells are counted in 8 hpf per condition. The results are given in number of cells per hpf.

[0470] It appears that half of the maximal stimulation is obtained with a concentration of 12 ng/ml of non-mutated netrin 4 (NET-4) and 0.004 ng/ml of mutated netrin 4 (NET-4m). This means that the chimiotactic activity of the mutated netrin 4 is 3,000 times as active as the non mutated netrin 4.

[0471] Transfection of PC3 Cancer Cells

[0472] Prostate cancer cells (PC3) and Colon carcinoma are grown in DMEM medium complemented with antibiotics and foetal calf serum 10%. The transfection protocol was established as follows:
[0473] D1: inoculation of low density cells (10,000 cells/cm²) in a 10 cm diameter box
[0474] D2: transfection with pcDNA3-NET4 or pcDNA-3-NET-4m
[0475] 5 μg of plasmid were mixed with 5 μl of lipofectine and 100 μl of DMEM (without antibiotics) for half-an-hour at ambient temperature and softly mixed. The mixture is then diluted at 5 ml in DMEM and deposited dropwise in the box containing the PC3 cells. After an incubation of 6 hours in an incubator at 37° C., the medium is pumped out and replaced with 10 ml of fresh medium,
[0476] D3: rinsing of the box and incubation for 24 hours with DMEM medium containing 10% foetal calf serum and antibiotics,
[0477] D4: trypsinisation of the cells, incubation in four 10 cm diameter boxes in complete DMEM medium complemented with 500 μg/ml of geneticine (Sigma)
[0478] D17: sampling of cells clones (100-400 cells/clone) with a micropipette and transfer into wells of 2 cm²
[0479] D24: trypsinisation and incubation of cells clones in boxes with 12 wells (120,000 cells/well)
[0480] D27: rinsing of the wells and inoculation in DMEM medium without serum
[0481] D30: collecting of the conditioned media and analysis of the quantification of netrin 4 in each medium.

[0482] After the checking that the clones transfected with netrin 4 (NET-4) or mutated netrin 4 (NET-4m) have an equivalent duplication time (26-30 hours), the content of netrin 4 of each medium was measured as described previously in the paragraph relating to the proliferation test. 4 μl of conditioned medium were added to 100 μl of culture medium. The results are given in proliferation percentage in comparison with the control (well containing 4 μl of DMEM medium).

[0483] According to the FIG. 2, the medium of non-transfected cells as well as the clones 10 and 15 of NET 4 induce an equivalent proliferation of HUAEC cells of about 300% in comparison with the control.

[0484] On the other hand, the conditioned medium of the clones 1 and 5 of NET-4m as well as the clone 8 of NET-4 stimulate the proliferation of HUAEC cells of only 200%, which corresponds to about 50% of the proliferation as induced by the conditioned medium of PC3 cells.

[0485] Thus netrin 4 (NET-4) or mutated netrin 4 (NET-4m) does notmodify the proliferation of PC3 cancer cells.

[0486] Transfection of LS174.

[0487] Colon carcinoma LS174 cells are grown in DMEM medium complemented with antibiotics and foetal calf serum 10%.

[0488] The transfection protocol was established as follows:
[0489] D1: inoculation of low density cells (10,000 cells/cm²) in a 10 cm diameter box
[0490] D2: transfection with pcDNA3-DeltaC NET-4m or pcDNA-3-NET-4m

[0491] 5 μg of plasmid were mixed with 5 μl of lipofectine and 100 μl of DMEM (without antibiotics) for half-an-hour at ambient temperature and softly mixed. The mixture is then diluted at 5 ml in DMEM and deposited dropwise in the box containing the LS174 cells. After an incubation of 6 hours in an incubator at 37° C., the medium is pumped out and replaced with 10 ml of fresh medium,
[0492] D3: rinsing of the box and incubation for 24 hours with DMEM medium containing 10% foetal calf serum and antibiotics,
[0493] D4: trypsinisation of the cells, incubation in four 10 cm diameter boxes in complete DMEM medium complemented with 500 μg/ml of geneticine (Sigma)
[0494] D17: sampling of cells clones (100-400 cells/clone) with a micropipette and transfer into wells of 2 cm²
[0495] D24: trypsinisation and incubation of cells clones in boxes with 12 wells (120,000 cells/well)
[0496] D27: rinsing of the wells and inoculation in DMEM medium without serum
[0497] D30: collecting of the conditioned media and analysis of the quantification of netrin 4 in each medium.

[0498] After the checking that the clones transfected with netrin 4 (NET-4) or mutated netrin 4 (NET-4m) have an equivalent duplication time (26-30 hours), the content of netrin 4 of each medium was measured as described previously in the paragraph relating to the proliferation test. 4 μl of conditioned medium were added to 100 μl of culture medium. The results are given in proliferation percentage in comparison with the control (well containing 4 μl of DMEM medium).

[0499] Several clones were selected for each transfection. FS2 and FS3 are two representative clones of LS174 cells transfected with NET-4m. DeltaC1 and DeltaC2 are two representative clones of LS174 cells transfected with NET-4m DeltaC.

[0500] Analysis of the Tumorigenicity of the Clones of Transfected PC3 Cells

[0501] Non-transfected PC3 cells and PC3 cells transfected with NET4m (clones 1 and 5) were injected to nude mice's flank (1 million of cells pro injection). The length (L) and width (l) of each tumor were measured with a caliper and the volume is expressed by the formula 0.52×L×l². According to FIG. 3, it appears that the clones 1 and 5 give tumors much smaller than the tumors as obtained with PC3 cells. The reduction is greater than 80%.

[0502] Thus the mutated netrin 4 of the invention (NET-4m) exerts an anti-tumoral activity through its anti-angiogenic activity. It appears that mutated netrin 4 decreases the ratio of proliferating cells by 30% (clone 1) and 60% (clone 5), respectively. It also appears that mutated netrin-4 expression in PC3 cells increases the pericyte coverage of endothelial cells by 1.3 (clone 1) and 2-fold (clone 5), respectively. In fact the decrease of the ratio CD31/desmin (FIG. 3C) indicates that there are less endothelial cells which are not covered by pericytes in tumors obtained from PC3 cells transfected with mutated netrin-4.

[0503] Analysis of the Tumorigenicity of the Clones of Transfected LS174 Cells

[0504] Non-transfected LS174 cells, LS174 cells transfected with NET-4m (FS2 and FS3) and LS174 cells transfected with DeltaC NET-4m (DeltaC1 and DeltaC2) were injected to nude mice's flank (1 million of cells pro injection). The length (L) and width (1) of each tumor were measured with a caliper and the volume is expressed by the formula 0.52×L×1². Tumor volumes were recorded at J 25 and expressed as percentage of the volume of non transfected LS174 tumors.

[0505] According to FIG. 11, it appears that the clones FS2 and FS3 give tumors much smaller than the tumors as obtained with LS174 cells, or LS174 cells transfected with DeltaC NET4m.

[0506] Thus the mutated netrin 4 of the invention (FS2 and FS3) exerts an antitumoral activity through its anti-angiogenic activity. It appears that DeltaC deleted netrin4 tumors behave as the parental cells thus demonstrating that the C-terminus sequence of netrin4 is required for its anti tumor angiogenesis activity whereas it is not for its activity to inhibit choroidal angiogenesis.

[0507] Synergic Effect of NET-4m on the Inhibition of VEGF

[0508] It is now well known that VEGF is a major actor of the pathologic angiogenesis and that its inhibition is a major therapeutic pathway. An anti-VEGF antibody is commercialized under the name AVASTIN®. Knowing that the netrin 4 (NET-4) acts through a mechanism of action differing from the one of the VEGF, the synergic effect of the netrin 4 (NET-4) with an anti-VEGF antibody commercialized under the name of AVASTIN® was measured.

[0509] Mice received a graft of non-transfected colon carcinoma LS174 cells or of LS174 cells transfected with NET-4 (clones FS3, 8, 10 or 15). As soon as the tumors had a volume greater than 400 mm³, the mice received a peritoneal injection of AVASTIN® (50 μg every 3 days), said dose corresponding to the therapeutic recommendations in human pathology (10 mg/kg/every other week) and the tumor volume was measured as described previously.

[0510] It appears on FIG. 4A that AVASTIN® has no effect on non-transfected LS174 and that the doubling time of the tumors treated or not was 3 to 4 days. On the contrary the volume doubling time of the transfected clone FS3 was of 5 days in untreated mice and 9 days in treated mice (FIG. 4B): thus the netrin 4 allowed the restoration of the sensitivity to anti-VEGF treatments in great tumors.

[0511] Effect of NET-4m (MC4) on the Migration of SMC

[0512] pgsA-745 CHO cells were transfected with the PCDNA-3 expression vectors containing the whole sequence of mutated netrin 4 (MC4). After 16 hours, the cells were incubated with DMEM medium and the conditioned media were collected after 48 hours. The migration activity on SMC cells was measured as described previously (see FIG. 6).

[0513] Choroid Neovascularization (FIGS. 5A, 5B, 5C and 10)

[0514] Eight-week old Brown Norway rats (Janvier, Le Genest-St Isle, France) were anesthetized by intraperitoneal injection of 0.14 ml sodium pentobarbital (Sanofi Santé Animale). The pupils were dilated with 1% tropicamide (Théa, Clermont-Ferrand, France). Photocoagulation lesions were created around the optic nerve 1 to 2 disc diameters away from the papillae with an argon laser photocoagulator (Quantel Medical Clermont-Ferrand, France) set at 532 nm, mounted on a slit lamp and with a cover glass fulfilling the role of contact lens (parameters fixed to 150 mW, 100 ms and 100 μm). In all treated eyes included in the study, a reactive bubble at the retinal surface was observed after laser delivery as evidence for appropriate focusing and an indication of the rupture of Bruch's membrane. Rats were injected with netrin4 (1 ng of NET-4m) in a volume of 5 μl under the subretinal space on days 7 and day 10 after laser photocoagulation. 14 days after laser treatment, all animals were perfused with 1 ml of PBS containing 50 mg/ml fluorescein-labelled dextran (FITC-dextran; average molecular mass, 2×10⁶; Sigma-Aldrich) and sacrificed. The eyes were harvested and fixed in PBS 4% paraformaldehyde (PAF) solution (LADD, Inland Europe, Conflans-sur-Lanterne, France). Retinas and choroids were dissected, and fixed for an additional 15 minutes at room temperature in methanol. The enucleated eyes were sectioned at the equator and the anterior half, including the lens and vitreous, was discarded. The retinas were carefully peeled from the eyecup and optic nerve by using specialized scissors and forceps under a biomicroscope (Wild M3Z, Heerbrugg). The posterior eye segment containing the complex sclera-choroid and the retina was dissected into quarters by four radial cuts. After washing in PBS, the flat mounts were mounted with Gelmount® (Biomeda, Foster City, Calif., USA), air-dried and examined under a fluorescence microscope (BX51; Olympus, Melville, N.Y.) at 488 nm or 594 nm excitation wavelength as appropriate. The incidence and size of the CNV complex were scored by morphometric analysis of the images with Image J Software (v1.36, NIH, USA). Subretinal injections of NET-4m (1 ng), after the onset of angiogenesis, reduced choroid neovascularization, as visualized by dextran perfusion, by more than 70%.

[0515] C57BL/6 mice (Janvier, Le Genest-St Isle, France) were anesthetized by intraperitoneal injection of 0.14 ml sodium pentobarbital (Sanofi Santé Animale). The pupils were dilated with 1% tropicamide (Théa, Clermont-Ferrand, France). Photocoagulation lesions were created around the optic nerve 1 to 2 disc diameters away from the papillae with an argon laser photocoagulator (Quantel Medical Clermont-Ferrand, France) set at 532 nm, mounted on a slit lamp and with a cover glass fulfilling the role of contact lens (parameters fixed to 150 mW, 100 ms and 100 μm). In all treated eyes included in the study, a reactive bubble at the retinal surface was observed after laser delivery as evidence for appropriate focusing and an indication of the rupture of Bruch's membrane. Mice were injected with netrin4 20 pg of NET-4m) in a volume of 1 μl under the intravitreal space on days 7 and day 10 after laser photocoagulation. 14 days after laser treatment, all animals were perfused with 1 ml of PBS containing 50 mg/ml fluorescein-labelled dextran (FITC-dextran; average molecular mass, 2×10⁶; Sigma-Aldrich) and sacrificed. The eyes were harvested and fixed in PBS 4% paraformaldehyde (PAF) solution (LADD, Inland Europe, Conflans-sur-Lanterne, France). Retinas and choroids were dissected, and fixed for an additional 15 minutes at room temperature in methanol. The enucleated eyes were sectioned at the equator and the anterior half, including the lens and vitreous, was discarded. The retinas were carefully peeled from the eyecup and optic nerve by using specialized scissors and forceps under a biomicroscope (Wild M3Z, Heerbrugg). The posterior eye segment containing the complex sclera-choroid and the retina was dissected into quarters by four radial cuts. After washing in PBS, the flat mounts were mounted with Gelmount® (Biomeda, Foster City, Calif., USA), air-dried and examined under a fluorescence microscope (BX51; Olympus, Melville, N.Y.) at 488 nm or 594 nm excitation wavelength as appropriate. The incidence and size of the CNV complex were scored by morphometric analysis of the images with Image J Software (v1.36, NIH, USA). Intravitreal injection of NET-4m or DeltaC NET-4m, after the onset of angiogenesis, reduced choroidal neovascularization, as visualized by dextran perfusion, by 74% and 62% respectively.

[0516] Data of FIG. 5 A, B, C and FIG. 10 demonstrate that NET-4m inhibit choroidal neovascularization in mice and rats and that NET-4m can be supplied either by subretinal or intravitral route.

[0517] Peritoneous Carcimomatosis

[0518] 10⁶ LS174 or mutated transfected LS174 (FS3 as described above) were injected in the peritoneal cavity of Nod-Scid mice. After 21 days the carcinomatosis was recorded by the Sugerbaker's score (Observations concerning cancer spread within the peritoneal cavity and concepts supporting an ordered pathophysiology. Cancer Treat Res. 1996; 82:79-100). The ascite was collected and its volume was measured and photomicrographs of the peritoneal cavity were taken.

[0519] As shown on FIG. 8A, the daily score of Sugerbaker was 0.78 in LS174 tumors was 0.75±0.2 and reduced to 0.35±0.12 in FS3 tumors (p<0.05). The ascites volume (FIG. 8B) was reduced from 1.5±0.9 ml to 0.1±0.1 ml in FS3 tumors. In FIG. 8C, it appears that the endocavital face of peritoneoum contained numerous tumors aligned along new vessels in LS174 tumors whereas the vessels were thin in FS3 injected mice and free of tumors.

[0520] Combination of Pericytes and Mutated Netrin-4 as an Anti-Cancer Agent

[0521] As shown in FIG. 9 the injection of pericytes to nude mice bearing a tumor derived from PC3 cells have no antitumoral activity. When PC3 cells are transfected with mutated netrin-4, the tumor volume is lower and is almost totally abolished by the injection of pericytes.

[0522] Production of NET-4m Proteins

[0523] pgsA-745 CHO cells are grown in DMEM medium complemented with antibiotics and foetal calf serum 10%. The transfection protocol was established as follows:
[0524] D1: inoculation of low density cells (10,000 cells/cm²) in a 10 cm diameter box
[0525] D2: transfection with pcDNA3-NET4 or pcDNA-3-NET-4m, or other sequences as above mentioned
[0526] 5 μg of plasmid were mixed with 5 μl of lipofectine and 100 μl of DMEM (without antibiotics) for half-an-hour at ambient temperature and softly mixed. The mixture is then diluted at 5 ml in DMEM and deposited dropwise in the plate containing the CHO cells. After an incubation of 16 hours in an incubator at 37° C., the medium is pumped out and replaced with 10 ml of fresh DMEM,
[0527] D5: collection of the conditioned medium.

[0528] Purification of NET-4m Proteins.

[0529] Conditioned media were adjusted to pH 7.4 with 10 mM Hepes buffer and the 10 ml mixture were mixed with 200 μl of cation exchange matrix (Sp sepharose, Pharmacia) for 4 hours at 4° C. Then the mixture was centrifugated at 800 g for 5 minutes. The pellet was washed with 10 mM Hepes buffer containing 0.1 M NaCl. Then the NET-4m proteins were eluted from Sp Sepharose by stepwise NaCl gradient (0.2 M, 0.4 M, 0.8 M NaCl) under a final volume of 0.5 ml per fraction. The active NET-4m was eluted between 0.4 and 0.8 M NaCl. The active material (determined by an ELISA assay as aboved described) were diluted with 2 volumes of distilled H₂O containing 10 mM Hepes and applied to an Heparin sepharose (Pharmacia) column chromatography (200 μl). The column was then washed with 1 ml of 10 mM Hepes containing 0.3 M NaCl. The NET-4m proteins were then eluted by 0.5 ml og 10 mM Hepes containing 1.2 M NaCl and assayed for their mitogenic activity on SMC cells.

The application's sequence listing, which the Patent Office published only in electronic form, follows.

SEQUENCE LISTING (565 sequences)

SEQ ID NO: 1 - DNA, 1887 bp, Homo sapiens
  CDS (1)..(1887)
atggggagctgcgcgcggctgctgctgctctggggctgcacggtggtggccgcaggactgagtggagtagctggagtgagttcccgctgtgaaaaagcctgcaaccctcggatgggaaatttggctttggggcgaaaactctgggcagacaccacctgcggtcagaatgctaccgaactgtactgcttctacagtgagaacaaggatctgacttgtcggcagcccaaatgtgacaagtgcaatgctgcctatcctcacctggctcacctgccatctgccatggcagactcatccttccggtttcctcgcacatggtggcagtctgcggaggatgtgcacagagaaaagatccagttagacctggaagctgaattctacttcactcacctaattgtgatgttcaagtcccccaggccggctgccatggtgctggaccgctcccaggactttgggaaaacatggaagccttataagtactttgcgactaactgctccgctacatttggcctggaagatgatgttgtcaagaagggcgctatttgtacttctaaatactccagtccttttccatgcactggaggagaggttattttcaaagctttgtcaccaccacacgatacagagaacccttacagtgccaaagttcaggagcagctgaagatcaccaaccttcgcgtgcagctgctgaaacgacagtcttgtccctgtcagagaaatgacctgaacgaagagcctcaacattttacacactatgcgatctatgatttcattgtcaagggcagctgcttctgcaatggccacgccgatcaatgcatacctgttcatggcttcagacctgtcaaggccccaggaacattccacatggtccatgggaagtgtatgtgtaagcacaacacagcaggcagccactgccagcactgtgccccgttatacaatgaccggccatgggaggcagctgatggcaaaacgggggctcccaacgagtgcagagcctgcaagtgtaatgggcatgctgatacctgtcacttcgacgttaatgtgtgggaggcatcagggaatcgtagtggtggtgtctgtgatgactgtcagcacaacacagaaggacagtattgccagaggtgcaagccaggcttctatcgtgacctgcggagacccttctcagctccagatgcttgcaaaccgtgttcctgccatccagtaggatcagctgtccttcctgccaactcagtgaccttctgcgaccccagcaatggtgactgcccttgcaagcctggggtggcagggcgacgttgtgacaggtgcatggtgggatactggggcttcggagactatggctgtcgaccatgtgactgtgcggggagctgtgaccctatcaccggagactgcatcagcagccacacagacatagactggtgtcatgaagttcctgacttccgtcccgtgcacaataagagcgaaccagcctgggagtgggaggatgcgcaggggttttctgcacttctacactcaggtaaatgcgaatgtaaggaacagacattaggaaatgccaaggcattctgtggaatgaaatattcatatgtgctaaaaataaagattttatcagctcatgataaaggtactcatgttgaggtcaatgtgaagattaaaaaggtcttaaaatctaccaaactgaagattttccgaggaaagcgaacattatatccagaatcatggacggacagaggatgcacttgtccaatcctcaatcctggtttggaataccttgtagcaggacatgaggatataagaacaggcaaactaattgtgaatatgaaaagctttgtccagcactggaaaccttctcttggaagaaaagtcatggatattttaaaaagagagtgcaagtag

SEQ ID NO: 2 - protein, 628 aa, Homo sapiens
MGSCARLLLLWGCTVVAAGLSGVAGVSSRCEKACNPRMGNLALGRKLWADTTCGQNATELYCFYSENKDLTCRQPKCDKCNAAYPHLAHLPSAMADSSFRFPRTWWQSAEDVHREKIQLDLEAEFYFTHLIVMFKSPRPAAMVLDRSQDFGKTWKPYKYFATNCSATFGLEDDVVKKGAICTSKYSSPFPCTGGEVIFKALSPPHDTENPYSAKVQEQLKITNLRVQLLKRQSCPCQRNDLNEEPQHFTHYAIYDFIVKGSCFCNGHADQCIPVHGFRPVKAPGTFHMVHGKCMCKHNTAGSHCQHCAPLYNDRPWEAADGKTGAPNECRACKCNGHADTCHFDVNVWEASGNRSGGVCDDCQHNTEGQYCQRCKPGFYRDLRRPFSAPDACKPCSCHPVGSAVLPANSVTFCDPSNGDCPCKPGVAGRRCDRCMVGYWGFGDYGCRPCDCAGSCDPITGDCISSHTDIDWCHEVPDFRPVHNKSEPAWEWEDAQGFSALLHSGKCECKEQTLGNAKAFCGMKYSYVLKIKILSAHDKGTHVEVNVKIKKVLKSTKLKIFRGKRTLYPESWTDRGCTCPILNPGLEYLVAGHEDIRTGKLIVNMKSFVQHWKPSLGRKVMDILKRECK

SEQ ID NO: 3 - DNA, 1884 bp, Homo sapiens
  CDS (1)..(1884)
atggggagctgcgcgcggctgctgctgctctggggccgcacggtggtggccgcaggactgagtggagtagctggagtgagttcccgctgtgaaaaagcctgcaaccctcggatgggaaatttggctttggggcgaaaactctgggcagacaccacctgcggtcagaatgctaccgaactgtactgcttctacagtgagaacacggatctgacttgtcggcagcccaaatgtgacaagtgcaatgctgcctatcctcacctggctcacctgccatctgccatggcagactcatccttccggtttcctcgcacatggtggcagtctgcggaggatgtgcacagagaaaagatccagttagacctggaagctgaattctacttcactcacctaattgtgatgttcaagtcccccaggccggctgccatggtgctggaccgctcccaggactttgggaaaacatggaagccttataagtactttgcgactaactgctccgctacatttggcctggaagatgatgttgtcaagaagggcgctatttgtactcctaaatactccagtccttttccatgcactggaggagaggttattttcaaagctttgtcaccaccatacgatacagagaacccttacagtgccaaagttcaggagcagctgaagatcaccaaccttcgcgtgcagctgctgaaacgacagtcttatccctgtcagagaaatgacctgaacgaagagcctcaacattttacacactatgcaatctatgatttcattgtcaagggcagctgcttctgcaatggccacgctgatcaatgcatacctgttcatggcttcagacctgtcaaggccccaggaacattccacatggtccatgggaagtgtatgtgtaagcacaacacagcaggcagccactgccagcactgtgccccgttatacaatgaccggccatgggaggcagctgacggcaaaacgggggctcccaacgagtgcagaacccgcaagtgtaatgggcatgctgatacctgtcacttcgacgttaatgtgtgggaggcatcagggagtcgtagtggtggtgtctgtgatgactgtcagcacaacacagaaggacagtattgccagaggtgcaagccaggcttctatcgtgacctgcggagacccttctcagctccagatgcttgcaaaccgtgttcctgccatccagtaggatcagctgtccttcctgccaactcagtgaccttctgcgaccccagcaatggtgactgcccttgcaagcctggggtggcagggcgacgttgtgacaggtgcatggtgggatactggggcttcggagactatggctgtcgaccatgtgactgtgcagggagctgtgaccctatcaccggagactgcatcagcagccacacagacatagactggtatcatgaagttcctgacttccgtcccgtgcacaataagagcgaaccagcctgggagtgggaggatgcgcaggggttttctgcacttctacactcaggtaaatgcgaatgtaaggaacagacattaggaaaggccaaggcattctgtggaatgaaatattcatatgtgctaaaaataaagattttatcagctcatgataaaggtactcatgttgaggtcaatgtgaagattaaaaaggtcttaaaatctaccaaactgaagattttccgaggaaagcgaacattatatccagaatcatggacggacagaggatgcacttgtccaatcctcaatcctggtttggaataccttgcagcaggacatgaggatataagaacaggcaaactaattgtgaatatgaaaagctttgtccagcactggaaaccttctcttggaagaaaagtcatggatattttaaaagagagtgcaagt

SEQ ID NO: 4 - protein, 628 aa, Homo sapiens
MGSCARLLLLWGRTVVAAGLSGVAGVSSRCEKACNPRMGNLALGRKLWADTTCGQNATELYCFYSENTDLTCRQPKCDKCNAAYPHLAHLPSAMADSSFRFPRTWWQSAEDVHREKIQLDLEAEFYFTHLIVMFKSPRPAAMVLDRSQDFGKTWKPYKYFATNCSATFGLEDDVVKKGAICTPKYSSPFPCTGGEVIFKALSPPYDTENPYSAKVQEQLKITNLRVQLLKRQSYPCQRNDLNEEPQHFTHYAIYDFIVKGSCFCNGHADQCIPVHGFRPVKAPGTFHMVHGKCMCKHNTAGSHCQHCAPLYNDRPWEAADGKTGAPNECRTRKCNGHADTCHFDVNVWEASGSRSGGVCDDCQHNTEGQYCQRCKPGFYRDLRRPFSAPDACKPCSCHPVGSAVLPANSVTFCDPSNGDCPCKPGVAGRRCDRCMVGYWGFGDYGCRPCDCAGSCDPITGDCISSHTDIDWYHEVPDFRPVHNKSEPAWEWEDAQGFSALLHSGKCECKEQTLGKAKAFCGMKYSYVLKIKILSAHDKGTHVEVNVKIKKVLKSTKLKIFRGKRTLYPESWTDRGCTCPILNPGLEYLAAGHEDIRTGKLIVNMKSFVQHWKPSLGRKVMDILKESAS

SEQ ID NO: 5 - DNA, 1914 bp, Homo sapiens
  CDS (1)..(1914)
atggggagctgcgcgcggctgctgctgctctggggccgcacggtggtggccgcaggactgagtggagtagctggagtgagttcccgctgtgaaaaagcctgcaaccctcggatgggaaatttggctttggggcgaaaactctgggcagacaccacctgcggtcagaatgctaccgaactgtactgcttctacagtgagaacacggatctgacttgtcggcagcccaaatgtgacaagtgcaatgctgcctatcctcacctggctcacctgccatctgccatggcagactcatccttccggtttcctcgcacatggtggcagtctgcggaggatgtgcacagagaaaagatccagttagacctggaagctgaattctacttcactcacctaattgtgatgttcaagtcccccaggccggctgccatggtgctggaccgctcccaggactttgggaaaacatggaagccttataagtactttgcgactaactgctccgctacatttggcctggaagatgatgttgtcaagaagggcgctatttgtactcctaaatactccagtccttttccatgcactggaggagaggttattttcaaagctttgtcaccaccatacgatacagagaacccttacagtgccaaagttcaggagcagctgaagatcaccaaccttcgcgtgcagctgctgaaacgacagtcttatccctgtcagagaaatgacctgaacgaagagcctcaacattttacacactatgcgatctatgatttcattgtcaagggcagctgcttctgcaatggccacgccgatcaatgcatacctgttcatggcttcagacctgtcaaggccccaggaacattccacatggtccatgggaagtgtatgtgtaagcacaacacagcaggcagccactgccagcactgtgccccgttatacaatgaccggccatgggaggcagctgatggcaaaacgggggctcccaacgagtgcagaacccgcaagtgtaatgggcatgctgatacctgtcacttcgacgttaatgtgtgggaggcatcagggagtcgtagtggtggtgtctgtgatgactgtcagcacaacacagaaggacagtattgccagaggtgcaagccaggcttctatcgtgacctgcggagacccttctcagctccagatgcttgcaaaccgtgttcctgccatccagtaggatcagctgtccttcctgccaactcagtgaccttctgcgaccccagcaatggtgactgcccttgcaagcctggggtggcagggcgacgttgtgacaggtgcatggtgggatactggggcttcggagactatggctgtcgaccatgtgactgtgcggggagctgtgaccctatcaccggagactgcatcagcagccacacagacatagactggtatcatgaagttcctgacttccgtcccgtgcacaataagagcgaaccagcctgggagtgggaggatgcgcaggggttttctgcacttctacactcaggtaaatgcgaatgtaaggaacagacattaggaaaggccaaggcattctgtggaatgaaatattcatatgtgctaaaaataaagattttatcagctcatgataaaggtactcatgttgaggtcaatgtgaagattaaaaaggtcttaaaatctaccaaactgaagattttccgaggaaagcgaacattatatccagaatcatggacggacagaggatgcacttgtccaatcctcaatcctggtttggaataccttgcagcaggacatgaggatataagaacaggcaaactaattgtgaatatgaaaagctttgtccagcactggaaaccttctcttggaagaaaagtcatggatattttaaaagagagtgcaagtggatccgagctcggtaccaagcttacgtag

SEQ ID NO: 6 - protein, 637 aa, Homo sapiens
MGSCARLLLLWGRTVVAAGLSGVAGVSSRCEKACNPRMGNLALGRKLWADTTCGQNATELYCFYSENTDLTCRQPKCDKCNAAYPHLAHLPSAMADSSFRFPRTWWQSAEDVHREKIQLDLEAEFYFTHLIVMFKSPRPAAMVLDRSQDFGKTWKPYKYFATNCSATFGLEDDVVKKGAICTPKYSSPFPCTGGEVIFKALSPPYDTENPYSAKVQEQLKITNLRVQLLKRQSYPCQRNDLNEEPQHFTHYAIYDFIVKGSCFCNGHADQCIPVHGFRPVKAPGTFHMVHGKCMCKHNTAGSHCQHCAPLYNDRPWEAADGKTGAPNECRTRKCNGHADTCHFDVNVWEASGSRSGGVCDDCQHNTEGQYCQRCKPGFYRDLRRPFSAPDACKPCSCHPVGSAVLPANSVTFCDPSNGDCPCKPGVAGRRCDRCMVGYWGFGDYGCRPCDCAGSCDPITGDCISSHTDIDWYHEVPDFRPVHNKSEPAWEWEDAQGFSALLHSGKCECKEQTLGKAKAFCGMKYSYVLKIKILSAHDKGTHVEVNVKIKKVLKSTKLKIFRGKRTLYPESWTDRGCTCPILNPGLEYLAAGHEDIRTGKLIVNMKSFVQHWKPSLGRKVMDILKESASGSELGTKLT

SEQ ID NO: 7 - DNA, 1914 bp, Homo sapiens
  CDS (1)..(1914)
atggggagctgcgcgcggctgctgctgctctggggctgcacggtggtggccgcaggactgagtggagtagctggagtgagttcccgctgtgaaaaagcctgcaaccctcggatgggaaatttggctttggggcgaaaactctgggcagacaccacctgcggtcagaatgctaccgaactgtactgcttctacagtgagaacacggatctgacttgtcggcagcccaaatgtgacaagtgcaatgctgcctatcctcacctggctcacctgccatctgccatggcagactcatccttccggtttcctcgcacatggtggcagtctgcggaggatgtgcacagagaaaagatccagttagacctggaagctgaattctacttcactcacctaattgtgatgttcaagtcccccaggccggctgccatggtgctggaccgctcccaggactttgggaaaacatggaagccttataagtactttgcgactaactgctccgctacatttggcctggaagatgatgttgtcaagaagggcgctatttgtactcctaaatactccagtccttttccatgcactggaggagaggttattttcaaagctttgtcaccaccatacgatacagagaacccttacagtgccaaagttcaggagcagctgaagatcaccaaccttcgcgtgcagctgctgaaacgacagtcttatccctgtcagagaaatgacctgaacgaagagcctcaacattttacacactatgcgatctatgatttcattgtcaagggcagctgcttctgcaatggccacgccgatcaatgcatacctgttcatggcttcagacctgtcaaggccccaggaacattccacatggtccatgggaagtgtatgtgtaagcacaacacagcaggcagccactgccagcactgtgccccgttatacaatgaccggccatgggaggcagctgatggcaaaacgggggctcccaacgagtgcagaacccgcaagtgtaatgggcatgctgatacctgtcacttcgacgttaatgtgtgggaggcatcagggagtcgtagtggtggtgtctgtgatgactgtcagcacaacacagaaggacagtattgccagaggtgcaagccaggcttctatcgtgacctgcggagacccttctcagctccagatgcttgcaaaccgtgttcctgccatccagtaggatcagctgtccttcctgccaactcagtgaccttctgcgaccccagcaatggtgactgcccttgcaagcctggggtggcagggcgacgttgtgacaggtgcatggtgggatactggggcttcggagactatggctgtcgaccatgtgactgtgcggggagctgtgaccctatcaccggagactgcatcagcagccacacagacatagactggtatcatgaagttcctgacttccgtcccgtgcacaataagagcgaaccagcctgggagtgggaggatgcgcaggggttttctgcacttctacactcaggtaaatgcgaatgtaaggaacagacattaggaaaggccaaggcattctgtggaatgaaatattcatatgtgctaaaaataaagattttatcagctcatgataaaggtactcatgttgaggtcaatgtgaagattaaaaaggtcttaaaatctaccaaactgaagattttccgaggaaagcgaacattatatccagaatcatggacggacagaggatgcacttgtccaatcctcaatcctggtttggaataccttgcagcaggacatgaggatataagaacaggcaaactaattgtgaatatgaaaagctttgtccagcactggaaaccttctcttggaagaaaagtcatggatattttaaaagagagtgcaagtggatccgagctcggtaccaagcttacgtag

SEQ ID NO: 8 - protein, 637 aa, Homo sapiens
MGSCARLLLLWGCTVVAAGLSGVAGVSSRCEKACNPRMGNLALGRKLWADTTCGQNATELYCFYSENTDLTCRQPKCDKCNAAYPHLAHLPSAMADSSFRFPRTWWQSAEDVHREKIQLDLEAEFYFTHLIVMFKSPRPAAMVLDRSQDFGKTWKPYKYFATNCSATFGLEDDVVKKGAICTPKYSSPFPCTGGEVIFKALSPPYDTENPYSAKVQEQLKITNLRVQLLKRQSYPCQRNDLNEEPQHFTHYAIYDFIVKGSCFCNGHADQCIPVHGFRPVKAPGTFHMVHGKCMCKHNTAGSHCQHCAPLYNDRPWEAADGKTGAPNECRTRKCNGHADTCHFDVNVWEASGSRSGGVCDDCQHNTEGQYCQRCKPGFYRDLRRPFSAPDACKPCSCHPVGSAVLPANSVTFCDPSNGDCPCKPGVAGRRCDRCMVGYWGFGDYGCRPCDCAGSCDPITGDCISSHTDIDWYHEVPDFRPVHNKSEPAWEWEDAQGFSALLHSGKCECKEQTLGKAKAFCGMKYSYVLKIKILSAHDKGTHVEVNVKIKKVLKSTKLKIFRGKRTLYPESWTDRGCTCPILNPGLEYLAAGHEDIRTGKLIVNMKSFVQHWKPSLGRKVMDILKESASGSELGTKLT

SEQ ID NO: 9 - DNA, 1884 bp, Homo sapiens
  CDS (1)..(1884)
atggggagctgcgcgcggctgctgctgctctggggccgcacggtggtggccgcaggactgagtggagtagctggagtgagttcccgctgtgaaaaagcctgcaaccctcggatgggaaatttggctttggggcgaaaactctgggcagacaccacctgcggtcagaatgctaccgaactgtactgcttctacagtgagaacacggatctgacttgtcggcagcccaaatgtgacaagtgcaatgctgcctatcctcacctggctcacctgccatctgccatggcagactcatccttccggtttcctcgcacatggtggcagtctgcggaggatgtgcacagagaaaagatccagttagacctggaagctgaattctacttcactcacctaattgtgatgttcaagtcccccaggccggctgccatggtgctggaccgctcccaggactttgggaaaacatggaagccttataagtactttgcgactaactgctccgctacatttggcctggaagatgatgttgtcaagaagggcgctatttgtactcctaaatactccagtccttttccatgcactggaggagaggttattttcaaagctttgtcaccaccatacgatacagagaacccttacagtgccaaagttcaggagcagctgaagatcaccaaccttcgcgtgcagctgctgaaacgacagtcttatccctgtcagagaaatgacctgaacgaagagcctcaacattttacacactatgcgatctatgatttcattgtcaagggcagctgcttctgcaatggccacgccgatcaatgcatacctgttcatggcttcagacctgtcaaggccccaggaacattccacatggtccatgggaagtgtatgtgtaagcacaacacagcaggcagccactgccagcactgtgccccgttatacaatgaccggccatgggaggcagctgatggcaaaacgggggctcccaacgagtgcagagcccgcaagtgtaatgggcatgctgatacctgtcacttcgacgttaatgtgtgggaggcatcagggagtcgtagtggtggtgtctgtgatgactgtcagcacaacacagaaggacagtattgccagaggtgcaagccaggcttctatcgtgacctgcggagacccttctcagctccagatgcttgcaaaccgtgttcctgccatccagtaggatcagctgtccttcctgccaactcagtgaccttctgcgaccccagcaatggtgactgcccttgcaagcctggggtggcagggcgacgttgtgacaggtgcatggtgggatactggggcttcggagactatggctgtcgaccatgtgactgtgcggggagctgtgaccctatcaccggagactgcatcagcagccacacagacatagactggtatcatgaagttcctgacttccgtcccgtgcacaataagagcgaaccagcctgggagtgggaggatgcgcaggggttttctgcacttctacactcaggtaaatgcgaatgtaaggaacagacattaggaaaggccaaggcattctgtggaatgaaatattcatatgtgctaaaaataaagattttatcagctcatgataaaggtactcatgttgaggtcaatgtgaagattaaaaaggtcttaaaatctaccaaactgaagattttccgaggaaagcgaacattatatccagaatcatggacggacagaggatgcacttgtccaatcctcaatcctggtttggaataccttgcagcaggacatgaggatataagaacaggcaaactaattgtgaatatgaaaagctttgtccagcactggaaaccttctcttggaagaaaagtcatggatattttaaaagagagtgcaagt

SEQ ID NO: 10 - protein, 628 aa, Homo sapiens
MGSCARLLLLWGRTVVAAGLSGVAGVSSRCEKACNPRMGNLALGRKLWADTTCGQNATELYCFYSENTDLTCRQPKCDKCNAAYPHLAHLPSAMADSSFRFPRTWWQSAEDVHREKIQLDLEAEFYFTHLIVMFKSPRPAAMVLDRSQDFGKTWKPYKYFATNCSATFGLEDDVVKKGAICTPKYSSPFPCTGGEVIFKALSPPYDTENPYSAKVQEQLKITNLRVQLLKRQSYPCQRNDLNEEPQHFTHYAIYDFIVKGSCFCNGHADQCIPVHGFRPVKAPGTFHMVHGKCMCKHNTAGSHCQHCAPLYNDRPWEAADGKTGAPNECRARKCNGHADTCHFDVNVWEASGSRSGGVCDDCQHNTEGQYCQRCKPGFYRDLRRPFSAPDACKPCSCHPVGSAVLPANSVTFCDPSNGDCPCKPGVAGRRCDRCMVGYWGFGDYGCRPCDCAGSCDPITGDCISSHTDIDWYHEVPDFRPVHNKSEPAWEWEDAQGFSALLHSGKCECKEQTLGKAKAFCGMKYSYVLKIKILSAHDKGTHVEVNVKIKKVLKSTKLKIFRGKRTLYPESWTDRGCTCPILNPGLEYLAAGHEDIRTGKLIVNMKSFVQHWKPSLGRKVMDILKESAS

SEQ ID NO: 11 - DNA, 1884 bp, Homo sapiens
  CDS (1)..(1884)
atggggagctgcgcgcggctgctgctgctctggggccgcacggtggtggccgcaggactgagtggagtagctggagtgagttcccgctgtgaaaaagcctgcaaccctcggatgggaaatttggctttggggcgaaaactctgggcagacaccacctgcggtcagaatgctaccgaactgtactgcttctacagtgagaacacggatctgacttgtcggcagcccaaatgtgacaagtgcaatgctgcctatcctcacctggctcacctgccatctgccatggcagactcatccttccggtttcctcgcacatggtggcagtctgcggaggatgtgcacagagaaaagatccagttagacctggaagctgaattctacttcactcacctaattgtgatgttcaagtcccccaggccggctgccatggtgctggaccgctcccaggactttgggaaaacatggaagccttataagtactttgcgactaactgctccgctacatttggcctggaagatgatgttgtcaagaagggcgctatttgtactcctaaatactccagtccttttccatgcactggaggagaggttattttcaaagctttgtcaccaccatacgatacagagaacccttacagtgccaaagttcaggagcagctgaagatcaccaaccttcgcgtgcagctgctgaaacgacagtcttatccctgtcagagaaatgacctgaacgaagagcctcaacattttacacactatgcgatctatgatttcattgtcaagggcagctgcttctgcaatggccacgccgatcaatgcatacctgttcatggcttcagacctgtcaaggccccaggaacattccacatggtccatgggaagtgtatgtgtaagcacaacacagcaggcagccactgccagcactgtgccccgttatacaatgaccggccatgggaggcagctgatggcaaaacgggggctcccaacgagtgcagaacctgcaagtgtaatgggcatgctgatacctgtcacttcgacgttaatgtgtgggaggcatcagggagtcgtagtggtggtgtctgtgatgactgtcagcacaacacagaaggacagtattgccagaggtgcaagccaggcttctatcgtgacctgcggagacccttctcagctccagatgcttgcaaaccgtgttcctgccatccagtaggatcagctgtccttcctgccaactcagtgaccttctgcgaccccagcaatggtgactgcccttgcaagcctggggtggcagggcgacgttgtgacaggtgcatggtgggatactggggcttcggagactatggctgtcgaccatgtgactgtgcggggagctgtgaccctatcaccggagactgcatcagcagccacacagacatagactggtatcatgaagttcctgacttccgtcccgtgcacaataagagcgaaccagcctgggagtgggaggatgcgcaggggttttctgcacttctacactcaggtaaatgcgaatgtaaggaacagacattaggaaaggccaaggcattctgtggaatgaaatattcatatgtgctaaaaataaagattttatcagctcatgataaaggtactcatgttgaggtcaatgtgaagattaaaaaggtcttaaaatctaccaaactgaagattttccgaggaaagcgaacattatatccagaatcatggacggacagaggatgcacttgtccaatcctcaatcctggtttggaataccttgcagcaggacatgaggatataagaacaggcaaactaattgtgaatatgaaaagctttgtccagcactggaaaccttctcttggaagaaaagtcatggatattttaaaagagagtgcaagt

SEQ ID NO: 12 - protein, 628 aa, Homo sapiens
MGSCARLLLLWGRTVVAAGLSGVAGVSSRCEKACNPRMGNLALGRKLWADTTCGQNATELYCFYSENTDLTCRQPKCDKCNAAYPHLAHLPSAMADSSFRFPRTWWQSAEDVHREKIQLDLEAEFYFTHLIVMFKSPRPAAMVLDRSQDFGKTWKPYKYFATNCSATFGLEDDVVKKGAICTPKYSSPFPCTGGEVIFKALSPPYDTENPYSAKVQEQLKITNLRVQLLKRQSYPCQRNDLNEEPQHFTHYAIYDFIVKGSCFCNGHADQCIPVHGFRPVKAPGTFHMVHGKCMCKHNTAGSHCQHCAPLYNDRPWEAADGKTGAPNECRTCKCNGHADTCHFDVNVWEASGSRSGGVCDDCQHNTEGQYCQRCKPGFYRDLRRPFSAPDACKPCSCHPVGSAVLPANSVTFCDPSNGDCPCKPGVAGRRCDRCMVGYWGFGDYGCRPCDCAGSCDPITGDCISSHTDIDWYHEVPDFRPVHNKSEPAWEWEDAQGFSALLHSGKCECKEQTLGKAKAFCGMKYSYVLKIKILSAHDKGTHVEVNVKIKKVLKSTKLKIFRGKRTLYPESWTDRGCTCPILNPGLEYLAAGHEDIRTGKLIVNMKSFVQHWKPSLGRKVMDILKESAS

SEQ ID NO: 13 - DNA, 1884 bp, Homo sapiens
  CDS (1)..(1884)
atggggagctgcgcgcggctgctgctgctctggggccgcacggtggtggccgcaggactgagtggagtagctggagtgagttcccgctgtgaaaaagcctgcaaccctcggatgggaaatttggctttggggcgaaaactctgggcagacaccacctgcggtcagaatgctaccgaactgtactgcttctacagtgagaacacggatctgacttgtcggcagcccaaatgtgacaagtgcaatgctgcctatcctcacctggctcacctgccatctgccatggcagactcatccttccggtttcctcgcacatggtggcagtctgcggaggatgtgcacagagaaaagatccagttagacctggaagctgaattctacttcactcacctaattgtgatgttcaagtcccccaggccggctgccatggtgctggaccgctcccaggactttgggaaaacatggaagccttataagtactttgcgactaactgctccgctacatttggcctggaagatgatgttgtcaagaagggcgctatttgtactcctaaatactccagtccttttccatgcactggaggagaggttattttcaaagctttgtcaccaccatacgatacagagaacccttacagtgccaaagttcaggagcagctgaagatcaccaaccttcgcgtgcagctgctgaaacgacagtcttatccctgtcagagaaatgacctgaacgaagagcctcaacattttacacactatgcgatctatgatttcattgtcaagggcagctgcttctgcaatggccacgccgatcaatgcatacctgttcatggcttcagacctgtcaaggccccaggaacattccacatggtccatgggaagtgtatgtgtaagcacaacacagcaggcagccactgccagcactgtgccccgttatacaatgaccggccatgggaggcagctgatggcaaaacgggggctcccaacgagtgcagaacccgcaagtgtaatgggcatgctgatacctgtcacttcgacgttaatgtgtgggaggcatcagggaatcgtagtggtggtgtctgtgatgactgtcagcacaacacagaaggacagtattgccagaggtgcaagccaggcttctatcgtgacctgcggagacccttctcagctccagatgcttgcaaaccgtgttcctgccatccagtaggatcagctgtccttcctgccaactcagtgaccttctgcgaccccagcaatggtgactgcccttgcaagcctggggtggcagggcgacgttgtgacaggtgcatggtgggatactggggcttcggagactatggctgtcgaccatgtgactgtgcggggagctgtgaccctatcaccggagactgcatcagcagccacacagacatagactggtatcatgaagttcctgacttccgtcccgtgcacaataagagcgaaccagcctgggagtgggaggatgcgcaggggttttctgcacttctacactcaggtaaatgcgaatgtaaggaacagacattaggaaaggccaaggcattctgtggaatgaaatattcatatgtgctaaaaataaagattttatcagctcatgataaaggtactcatgttgaggtcaatgtgaagattaaaaaggtcttaaaatctaccaaactgaagattttccgaggaaagcgaacattatatccagaatcatggacggacagaggatgcacttgtccaatcctcaatcctggtttggaataccttgcagcaggacatgaggatataagaacaggcaaactaattgtgaatatgaaaagctttgtccagcactggaaaccttctcttggaagaaaagtcatggatattttaaaagagagtgcaagt

SEQ ID NO: 14 - protein, 628 aa, Homo sapiens
MGSCARLLLLWGRTVVAAGLSGVAGVSSRCEKACNPRMGNLALGRKLWADTTCGQNATELYCFYSENTDLTCRQPKCDKCNAAYPHLAHLPSAMADSSFRFPRTWWQSAEDVHREKIQLDLEAEFYFTHLIVMFKSPRPAAMVLDRSQDFGKTWKPYKYFATNCSATFGLEDDVVKKGAICTPKYSSPFPCTGGEVIFKALSPPYDTENPYSAKVQEQLKITNLRVQLLKRQSYPCQRNDLNEEPQHFTHYAIYDFIVKGSCFCNGHADQCIPVHGFRPVKAPGTFHMVHGKCMCKHNTAGSHCQHCAPLYNDRPWEAADGKTGAPNECRTRKCNGHADTCHFDVNVWEASGNRSGGVCDDCQHNTEGQYCQRCKPGFYRDLRRPFSAPDACKPCSCHPVGSAVLPANSVTFCDPSNGDCPCKPGVAGRRCDRCMVGYWGFGDYGCRPCDCAGSCDPITGDCISSHTDIDWYHEVPDFRPVHNKSEPAWEWEDAQGFSALLHSGKCECKEQTLGKAKAFCGMKYSYVLKIKILSAHDKGTHVEVNVKIKKVLKSTKLKIFRGKRTLYPESWTDRGCTCPILNPGLEYLAAGHEDIRTGKLIVNMKSFVQHWKPSLGRKVMDILKESAS

SEQ ID NO: 15 - DNA, 1884 bp, Homo sapiens
  CDS (1)..(1884)
atggggagctgcgcgcggctgctgctgctctggggccgcacggtggtggccgcaggactgagtggagtagctggagtgagttcccgctgtgaaaaagcctgcaaccctcggatgggaaatttggctttggggcgaaaactctgggcagacaccacctgcggtcagaatgctaccgaactgtactgcttctacagtgagaacacggatctgacttgtcggcagcccaaatgtgacaagtgcaatgctgcctatcctcacctggctcacctgccatctgccatggcagactcatccttccggtttcctcgcacatggtggcagtctgcggaggatgtgcacagagaaaagatccagttagacctggaagctgaattctacttcactcacctaattgtgatgttcaagtcccccaggccggctgccatggtgctggaccgctcccaggactttgggaaaacatggaagccttataagtactttgcgactaactgctccgctacatttggcctggaagatgatgttgtcaagaagggcgctatttgtactcctaaatactccagtccttttccatgcactggaggagaggttattttcaaagctttgtcaccaccatacgatacagagaacccttacagtgccaaagttcaggagcagctgaagatcaccaaccttcgcgtgcagctgctgaaacgacagtcttatccctgtcagagaaatgacctgaacgaagagcctcaacattttacacactatgcgatctatgatttcattgtcaagggcagctgcttctgcaatggccacgccgatcaatgcatacctgttcatggcttcagacctgtcaaggccccaggaacattccacatggtccatgggaagtgtatgtgtaagcacaacacagcaggcagccactgccagcactgtgccccgttatacaatgaccggccatgggaggcagctgatggcaaaacgggggctcccaacgagtgcagaacccgcaagtgtaatgggcatgctgatacctgtcacttcgacgttaatgtgtgggaggcatcagggagtcgtagtggtggtgtctgtgatgactgtcagcacaacacagaaggacagtattgccagaggtgcaagccaggcttctatcgtgacctgcggagacccttctcagctccagatgcttgcaaaccgtgttcctgccatccagtaggatcagctgtccttcctgccaactcagtgaccttctgcgaccccagcaatggtgactgcccttgcaagcctggggtggcagggcgacgttgtgacaggtgcatggtgggatactggggcttcggagactatggctgtcgaccatgtgactgtgcggggagctgtgaccctatcaccggagactgcatcagcagccacacagacatagactggtgtcatgaagttcctgacttccgtcccgtgcacaataagagcgaaccagcctgggagtgggaggatgcgcaggggttttctgcacttctacactcaggtaaatgcgaatgtaaggaacagacattaggaaaggccaaggcattctgtggaatgaaatattcatatgtgctaaaaataaagattttatcagctcatgataaaggtactcatgttgaggtcaatgtgaagattaaaaaggtcttaaaatctaccaaactgaagattttccgaggaaagcgaacattatatccagaatcatggacggacagaggatgcacttgtccaatcctcaatcctggtttggaataccttgcagcaggacatgaggatataagaacaggcaaactaattgtgaatatgaaaagctttgtccagcactggaaaccttctcttggaagaaaagtcatggatattttaaaagagagtgcaagt

SEQ ID NO: 16 - protein, 628 aa, Homo sapiens
MGSCARLLLLWGRTVVAAGLSGVAGVSSRCEKACNPRMGNLALGRKLWADTTCGQNATELYCFYSENTDLTCRQPKCDKCNAAYPHLAHLPSAMADSSFRFPRTWWQSAEDVHREKIQLDLEAEFYFTHLIVMFKSPRPAAMVLDRSQDFGKTWKPYKYFATNCSATFGLEDDVVKKGAICTPKYSSPFPCTGGEVIFKALSPPYDTENPYSAKVQEQLKITNLRVQLLKRQSYPCQRNDLNEEPQHFTHYAIYDFIVKGSCFCNGHADQCIPVHGFRPVKAPGTFHMVHGKCMCKHNTAGSHCQHCAPLYNDRPWEAADGKTGAPNECRTRKCNGHADTCHFDVNVWEASGSRSGGVCDDCQHNTEGQYCQRCKPGFYRDLRRPFSAPDACKPCSCHPVGSAVLPANSVTFCDPSNGDCPCKPGVAGRRCDRCMVGYWGFGDYGCRPCDCAGSCDPITGDCISSHTDIDWCHEVPDFRPVHNKSEPAWEWEDAQGFSALLHSGKCECKEQTLGKAKAFCGMKYSYVLKIKILSAHDKGTHVEVNVKIKKVLKSTKLKIFRGKRTLYPESWTDRGCTCPILNPGLEYLAAGHEDIRTGKLIVNMKSFVQHWKPSLGRKVMDILKESAS

SEQ ID NO: 17 - DNA, 1884 bp, Homo sapiens
  CDS (1)..(1884)
atggggagctgcgcgcggctgctgctgctctggggccgcacggtggtggccgcaggactgagtggagtagctggagtgagttcccgctgtgaaaaagcctgcaaccctcggatgggaaatttggctttggggcgaaaactctgggcagacaccacctgcggtcagaatgctaccgaactgtactgcttctacagtgagaacacggatctgacttgtcggcagcccaaatgtgacaagtgcaatgctgcctatcctcacctggctcacctgccatctgccatggcagactcatccttccggtttcctcgcacatggtggcagtctgcggaggatgtgcacagagaaaagatccagttagacctggaagctgaattctacttcactcacctaattgtgatgttcaagtcccccaggccggctgccatggtgctggaccgctcccaggactttgggaaaacatggaagccttataagtactttgcgactaactgctccgctacatttggcctggaagatgatgttgtcaagaagggcgctatttgtactcctaaatactccagtccttttccatgcactggaggagaggttattttcaaagctttgtcaccaccatacgatacagagaacccttacagtgccaaagttcaggagcagctgaagatcaccaaccttcgcgtgcagctgctgaaacgacagtcttatccctgtcagagaaatgacctgaacgaagagcctcaacattttacacactatgcgatctatgatttcattgtcaagggcagctgcttctgcaatggccacgccgatcaatgcatacctgttcatggcttcagacctgtcaaggccccaggaacattccacatggtccatgggaagtgtatgtgtaagcacaacacagcaggcagccactgccagcactgtgccccgttatacaatgaccggccatgggaggcagctgatggcaaaacgggggctcccaacgagtgcagagcctgcaagtgtaatgggcatgctgatacctgtcacttcgacgttaatgtgtgggaggcatcagggagtcgtagtggtggtgtctgtgatgactgtcagcacaacacagaaggacagtattgccagaggtgcaagccaggcttctatcgtgacctgcggagacccttctcagctccagatgcttgcaaaccgtgttcctgccatccagtaggatcagctgtccttcctgccaactcagtgaccttctgcgaccccagcaatggtgactgcccttgcaagcctggggtggcagggcgacgttgtgacaggtgcatggtgggatactggggcttcggagactatggctgtcgaccatgtgactgtgcggggagctgtgaccctatcaccggagactgcatcagcagccacacagacatagactggtatcatgaagttcctgacttccgtcccgtgcacaataagagcgaaccagcctgggagtgggaggatgcgcaggggttttctgcacttctacactcaggtaaatgcgaatgtaaggaacagacattaggaaaggccaaggcattctgtggaatgaaatattcatatgtgctaaaaataaagattttatcagctcatgataaaggtactcatgttgaggtcaatgtgaagattaaaaaggtcttaaaatctaccaaactgaagattttccgaggaaagcgaacattatatccagaatcatggacggacagaggatgcacttgtccaatcctcaatcctggtttggaataccttgcagcaggacatgaggatataagaacaggcaaactaattgtgaatatgaaaagctttgtccagcactggaaaccttctcttggaagaaaagtcatggatattttaaaagagagtgcaagt

SEQ ID NO: 18 - protein, 628 aa, Homo sapiens
MGSCARLLLLWGRTVVAAGLSGVAGVSSRCEKACNPRMGNLALGRKLWADTTCGQNATELYCFYSENTDLTCRQPKCDKCNAAYPHLAHLPSAMADSSFRFPRTWWQSAEDVHREKIQLDLEAEFYFTHLIVMFKSPRPAAMVLDRSQDFGKTWKPYKYFATNCSATFGLEDDVVKKGAICTPKYSSPFPCTGGEVIFKALSPPYDTENPYSAKVQEQLKITNLRVQLLKRQSYPCQRNDLNEEPQHFTHYAIYDFIVKGSCFCNGHADQCIPVHGFRPVKAPGTFHMVHGKCMCKHNTAGSHCQHCAPLYNDRPWEAADGKTGAPNECRACKCNGHADTCHFDVNVWEASGSRSGGVCDDCQHNTEGQYCQRCKPGFYRDLRRPFSAPDACKPCSCHPVGSAVLPANSVTFCDPSNGDCPCKPGVAGRRCDRCMVGYWGFGDYGCRPCDCAGSCDPITGDCISSHTDIDWYHEVPDFRPVHNKSEPAWEWEDAQGFSALLHSGKCECKEQTLGKAKAFCGMKYSYVLKIKILSAHDKGTHVEVNVKIKKVLKSTKLKIFRGKRTLYPESWTDRGCTCPILNPGLEYLAAGHEDIRTGKLIVNMKSFVQHWKPSLGRKVMDILKESAS

SEQ ID NO: 19 - DNA, 1884 bp, Homo sapiens
  CDS (1)..(1884)
atggggagctgcgcgcggctgctgctgctctggggccgcacggtggtggccgcaggactgagtggagtagctggagtgagttcccgctgtgaaaaagcctgcaaccctcggatgggaaatttggctttggggcgaaaactctgggcagacaccacctgcggtcagaatgctaccgaactgtactgcttctacagtgagaacacggatctgacttgtcggcagcccaaatgtgacaagtgcaatgctgcctatcctcacctggctcacctgccatctgccatggcagactcatccttccggtttcctcgcacatggtggcagtctgcggaggatgtgcacagagaaaagatccagttagacctggaagctgaattctacttcactcacctaattgtgatgttcaagtcccccaggccggctgccatggtgctggaccgctcccaggactttgggaaaacatggaagccttataagtactttgcgactaactgctccgctacatttggcctggaagatgatgttgtcaagaagggcgctatttgtactcctaaatactccagtccttttccatgcactggaggagaggttattttcaaagctttgtcaccaccatacgatacagagaacccttacagtgccaaagttcaggagcagctgaagatcaccaaccttcgcgtgcagctgctgaaacgacagtcttatccctgtcagagaaatgacctgaacgaagagcctcaacattttacacactatgcgatctatgatttcattgtcaagggcagctgcttctgcaatggccacgccgatcaatgcatacctgttcatggcttcagacctgtcaaggccccaggaacattccacatggtccatgggaagtgtatgtgtaagcacaacacagcaggcagccactgccagcactgtgccccgttatacaatgaccggccatgggaggcagctgatggcaaaacgggggctcccaacgagtgcagagcccgcaagtgtaatgggcatgctgatacctgtcacttcgacgttaatgtgtgggaggcatcagggaatcgtagtggtggtgtctgtgatgactgtcagcacaacacagaaggacagtattgccagaggtgcaagccaggcttctatcgtgacctgcggagacccttctcagctccagatgcttgcaaaccgtgttcctgccatccagtaggatcagctgtccttcctgccaactcagtgaccttctgcgaccccagcaatggtgactgcccttgcaagcctggggtggcagggcgacgttgtgacaggtgcatggtgggatactggggcttcggagactatggctgtcgaccatgtgactgtgcggggagctgtgaccctatcaccggagactgcatcagcagccacacagacatagactggtatcatgaagttcctgacttccgtcccgtgcacaataagagcgaaccagcctgggagtgggaggatgcgcaggggttttctgcacttctacactcaggtaaatgcgaatgtaaggaacagacattaggaaaggccaaggcattctgtggaatgaaatattcatatgtgctaaaaataaagattttatcagctcatgataaaggtactcatgttgaggtcaatgtgaagattaaaaaggtcttaaaatctaccaaactgaagattttccgaggaaagcgaacattatatccagaatcatggacggacagaggatgcacttgtccaatcctcaatcctggtttggaataccttgcagcaggacatgaggatataagaacaggcaaactaattgtgaatatgaaaagctttgtccagcactggaaaccttctcttggaagaaaagtcatggatattttaaaagagagtgcaagt

SEQ ID NO: 20 - protein, 628 aa, Homo sapiens
MGSCARLLLLWGRTVVAAGLSGVAGVSSRCEKACNPRMGNLALGRKLWADTTCGQNATELYCFYSENTDLTCRQPKCDKCNAAYPHLAHLPSAMADSSFRFPRTWWQSAEDVHREKIQLDLEAEFYFTHLIVMFKSPRPAAMVLDRSQDFGKTWKPYKYFATNCSATFGLEDDVVKKGAICTPKYSSPFPCTGGEVIFKALSPPYDTENPYSAKVQEQLKITNLRVQLLKRQSYPCQRNDLNEEPQHFTHYAIYDFIVKGSCFCNGHADQCIPVHGFRPVKAPGTFHMVHGKCMCKHNTAGSHCQHCAPLYNDRPWEAADGKTGAPNECRARKCNGHADTCHFDVNVWEASGNRSGGVCDDCQHNTEGQYCQRCKPGFYRDLRRPFSAPDACKPCSCHPVGSAVLPANSVTFCDPSNGDCPCKPGVAGRRCDRCMVGYWGFGDYGCRPCDCAGSCDPITGDCISSHTDIDWYHEVPDFRPVHNKSEPAWEWEDAQGFSALLHSGKCECKEQTLGKAKAFCGMKYSYVLKIKILSAHDKGTHVEVNVKIKKVLKSTKLKIFRGKRTLYPESWTDRGCTCPILNPGLEYLAAGHEDIRTGKLIVNMKSFVQHWKPSLGRKVMDILKESAS

SEQ ID NO: 21 - DNA, 1884 bp, Homo sapiens
  CDS (1)..(1884)
atggggagctgcgcgcggctgctgctgctctggggccgcacggtggtggccgcaggactgagtggagtagctggagtgagttcccgctgtgaaaaagcctgcaaccctcggatgggaaatttggctttggggcgaaaactctgggcagacaccacctgcggtcagaatgctaccgaactgtactgcttctacagtgagaacacggatctgacttgtcggcagcccaaatgtgacaagtgcaatgctgcctatcctcacctggctcacctgccatctgccatggcagactcatccttccggtttcctcgcacatggtggcagtctgcggaggatgtgcacagagaaaagatccagttagacctggaagctgaattctacttcactcacctaattgtgatgttcaagtcccccaggccggctgccatggtgctggaccgctcccaggactttgggaaaacatggaagccttataagtactttgcgactaactgctccgctacatttggcctggaagatgatgttgtcaagaagggcgctatttgtactcctaaatactccagtccttttccatgcactggaggagaggttattttcaaagctttgtcaccaccatacgatacagagaacccttacagtgccaaagttcaggagcagctgaagatcaccaaccttcgcgtgcagctgctgaaacgacagtcttatccctgtcagagaaatgacctgaacgaagagcctcaacattttacacactatgcgatctatgatttcattgtcaagggcagctgcttctgcaatggccacgccgatcaatgcatacctgttcatggcttcagacctgtcaaggccccaggaacattccacatggtccatgggaagtgtatgtgtaagcacaacacagcaggcagccactgccagcactgtgccccgttatacaatgaccggccatgggaggcagctgatggcaaaacgggggctcccaacgagtgcagagcccgcaagtgtaatgggcatgctgatacctgtcacttcgacgttaatgtgtgggaggcatcagggagtcgtagtggtggtgtctgtgatgactgtcagcacaacacagaaggacagtattgccagaggtgcaagccaggcttctatcgtgacctgcggagacccttctcagctccagatgcttgcaaaccgtgttcctgccatccagtaggatcagctgtccttcctgccaactcagtgaccttctgcgaccccagcaatggtgactgcccttgcaagcctggggtggcagggcgacgttgtgacaggtgcatggtgggatactggggcttcggagactatggctgtcgaccatgtgactgtgcggggagctgtgaccctatcaccggagactgcatcagcagccacacagacatagactggtgtcatgaagttcctgacttccgtcccgtgcacaataagagcgaaccagcctgggagtgggaggatgcgcaggggttttctgcacttctacactcaggtaaatgcgaatgtaaggaacagacattaggaaaggccaaggcattctgtggaatgaaatattcatatgtgctaaaaataaagattttatcagctcatgataaaggtactcatgttgaggtcaatgtgaagattaaaaaggtcttaaaatctaccaaactgaagattttccgaggaaagcgaacattatatccagaatcatggacggacagaggatgcacttgtccaatcctcaatcctggtttggaataccttgcagcaggacatgaggatataagaacaggcaaactaattgtgaatatgaaaagctttgtccagcactggaaaccttctcttggaagaaaagtcatggatattttaaaagagagtgcaagt

SEQ ID NO: 22 - protein, 628 aa, Homo sapiens
MGSCARLLLLWGRTVVAAGLSGVAGVSSRCEKACNPRMGNLALGRKLWADTTCGQNATELYCFYSENTDLTCRQPKCDKCNAAYPHLAHLPSAMADSSFRFPRTWWQSAEDVHREKIQLDLEAEFYFTHLIVMFKSPRPAAMVLDRSQDFGKTWKPYKYFATNCSATFGLEDDVVKKGAICTPKYSSPFPCTGGEVIFKALSPPYDTENPYSAKVQEQLKITNLRVQLLKRQSYPCQRNDLNEEPQHFTHYAIYDFIVKGSCFCNGHADQCIPVHGFRPVKAPGTFHMVHGKCMCKHNTAGSHCQHCAPLYNDRPWEAADGKTGAPNECRARKCNGHADTCHFDVNVWEASGSRSGGVCDDCQHNTEGQYCQRCKPGFYRDLRRPFSAPDACKPCSCHPVGSAVLPANSVTFCDPSNGDCPCKPGVAGRRCDRCMVGYWGFGDYGCRPCDCAGSCDPITGDCISSHTDIDWCHEVPDFRPVHNKSEPAWEWEDAQGFSALLHSGKCECKEQTLGKAKAFCGMKYSYVLKIKILSAHDKGTHVEVNVKIKKVLKSTKLKIFRGKRTLYPESWTDRGCTCPILNPGLEYLAAGHEDIRTGKLIVNMKSFVQHWKPSLGRKVMDILKESAS

SEQ ID NO: 23 - DNA, 1884 bp, Homo sapiens
  CDS (1)..(1884)
atggggagctgcgcgcggctgctgctgctctggggccgcacggtggtggccgcaggactgagtggagtagctggagtgagttcccgctgtgaaaaagcctgcaaccctcggatgggaaatttggctttggggcgaaaactctgggcagacaccacctgcggtcagaatgctaccgaactgtactgcttctacagtgagaacacggatctgacttgtcggcagcccaaatgtgacaagtgcaatgctgcctatcctcacctggctcacctgccatctgccatggcagactcatccttccggtttcctcgcacatggtggcagtctgcggaggatgtgcacagagaaaagatccagttagacctggaagctgaattctacttcactcacctaattgtgatgttcaagtcccccaggccggctgccatggtgctggaccgctcccaggactttgggaaaacatggaagccttataagtactttgcgactaactgctccgctacatttggcctggaagatgatgttgtcaagaagggcgctatttgtactcctaaatactccagtccttttccatgcactggaggagaggttattttcaaagctttgtcaccaccatacgatacagagaacccttacagtgccaaagttcaggagcagctgaagatcaccaaccttcgcgtgcagctgctgaaacgacagtcttatccctgtcagagaaatgacctgaacgaagagcctcaacattttacacactatgcgatctatgatttcattgtcaagggcagctgcttctgcaatggccacgccgatcaatgcatacctgttcatggcttcagacctgtcaaggccccaggaacattccacatggtccatgggaagtgtatgtgtaagcacaacacagcaggcagccactgccagcactgtgccccgttatacaatgaccggccatgggaggcagctgatggcaaaacgggggctcccaacgagtgcagaacctgcaagtgtaatgggcatgctgatacctgtcacttcgacgttaatgtgtgggaggcatcagggaatcgtagtggtggtgtctgtgatgactgtcagcacaacacagaaggacagtattgccagaggtgcaagccaggcttctatcgtgacctgcggagacccttctcagctccagatgcttgcaaaccgtgttcctgccatccagtaggatcagctgtccttcctgccaactcagtgaccttctgcgaccccagcaatggtgactgcccttgcaagcctggggtggcagggcgacgttgtgacaggtgcatggtgggatactggggcttcggagactatggctgtcgaccatgtgactgtgcggggagctgtgaccctatcaccggagactgcatcagcagccacacagacatagactggtatcatgaagttcctgacttccgtcccgtgcacaataagagcgaaccagcctgggagtgggaggatgcgcaggggttttctgcacttctacactcaggtaaatgcgaatgtaaggaacagacattaggaaaggccaaggcattctgtggaatgaaatattcatatgtgctaaaaataaagattttatcagctcatgataaaggtactcatgttgaggtcaatgtgaagattaaaaaggtcttaaaatctaccaaactgaagattttccgaggaaagcgaacattatatccagaatcatggacggacagaggatgcacttgtccaatcctcaatcctggtttggaataccttgcagcaggacatgaggatataagaacaggcaaactaattgtgaatatgaaaagctttgtccagcactggaaaccttctcttggaagaaaagtcatggatattttaaaagagagtgcaagt

SEQ ID NO: 24 - protein, 628 aa, Homo sapiens
MGSCARLLLLWGRTVVAAGLSGVAGVSSRCEKACNPRMGNLALGRKLWADTTCGQNATELYCFYSENTDLTCRQPKCDKCNAAYPHLAHLPSAMADSSFRFPRTWWQSAEDVHREKIQLDLEAEFYFTHLIVMFKSPRPAAMVLDRSQDFGKTWKPYKYFATNCSATFGLEDDVVKKGAICTPKYSSPFPCTGGEVIFKALSPPYDTENPYSAKVQEQLKITNLRVQLLKRQSYPCQRNDLNEEPQHFTHYAIYDFIVKGSCFCNGHADQCIPVHGFRPVKAPGTFHMVHGKCMCKHNTAGSHCQHCAPLYNDRPWEAADGKTGAPNECRTCKCNGHADTCHFDVNVWEASGNRSGGVCDDCQHNTEGQYCQRCKPGFYRDLRRPFSAPDACKPCSCHPVGSAVLPANSVTFCDPSNGDCPCKPGVAGRRCDRCMVGYWGFGDYGCRPCDCAGSCDPITGDCISSHTDIDWYHEVPDFRPVHNKSEPAWEWEDAQGFSALLHSGKCECKEQTLGKAKAFCGMKYSYVLKIKILSAHDKGTHVEVNVKIKKVLKSTKLKIFRGKRTLYPESWTDRGCTCPILNPGLEYLAAGHEDIRTGKLIVNMKSFVQHWKPSLGRKVMDILKESAS

SEQ ID NO: 25 - DNA, 1884 bp, Homo sapiens
  CDS (1)..(1884)
atggggagctgcgcgcggctgctgctgctctggggccgcacggtggtggccgcaggactgagtggagtagctggagtgagttcccgctgtgaaaaagcctgcaaccctcggatgggaaatttggctttggggcgaaaactctgggcagacaccacctgcggtcagaatgctaccgaactgtactgcttctacagtgagaacacggatctgacttgtcggcagcccaaatgtgacaagtgcaatgctgcctatcctcacctggctcacctgccatctgccatggcagactcatccttccggtttcctcgcacatggtggcagtctgcggaggatgtgcacagagaaaagatccagttagacctggaagctgaattctacttcactcacctaattgtgatgttcaagtcccccaggccggctgccatggtgctggaccgctcccaggactttgggaaaacatggaagccttataagtactttgcgactaactgctccgctacatttggcctggaagatgatgttgtcaagaagggcgctatttgtactcctaaatactccagtccttttccatgcactggaggagaggttattttcaaagctttgtcaccaccatacgatacagagaacccttacagtgccaaagttcaggagcagctgaagatcaccaaccttcgcgtgcagctgctgaaacgacagtcttatccctgtcagagaaatgacctgaacgaagagcctcaacattttacacactatgcgatctatgatttcattgtcaagggcagctgcttctgcaatggccacgccgatcaatgcatacctgttcatggcttcagacctgtcaaggccccaggaacattccacatggtccatgggaagtgtatgtgtaagcacaacacagcaggcagccactgccagcactgtgccccgttatacaatgaccggccatgggaggcagctgatggcaaaacgggggctcccaacgagtgcagaacctgcaagtgtaatgggcatgctgatacctgtcacttcgacgttaatgtgtgggaggcatcagggagtcgtagtggtggtgtctgtgatgactgtcagcacaacacagaaggacagtattgccagaggtgcaagccaggcttctatcgtgacctgcggagacccttctcagctccagatgcttgcaaaccgtgttcctgccatccagtaggatcagctgtccttcctgccaactcagtgaccttctgcgaccccagcaatggtgactgcccttgcaagcctggggtggcagggcgacgttgtgacaggtgcatggtgggatactggggcttcggagactatggctgtcgaccatgtgactgtgcggggagctgtgaccctatcaccggagactgcatcagcagccacacagacatagactggtgtcatgaagttcctgacttccgtcccgtgcacaataagagcgaaccagcctgggagtgggaggatgcgcaggggttttctgcacttctacactcaggtaaatgcgaatgtaaggaacagacattaggaaaggccaaggcattctgtggaatgaaatattcatatgtgctaaaaataaagattttatcagctcatgataaaggtactcatgttgaggtcaatgtgaagattaaaaaggtcttaaaatctaccaaactgaagattttccgaggaaagcgaacattatatccagaatcatggacggacagaggatgcacttgtccaatcctcaatcctggtttggaataccttgcagcaggacatgaggatataagaacaggcaaactaattgtgaatatgaaaagctttgtccagcactggaaaccttctcttggaagaaaagtcatggatattttaaaagagagtgcaagt

SEQ ID NO: 26 - protein, 628 aa, Homo sapiens
MGSCARLLLLWGRTVVAAGLSGVAGVSSRCEKACNPRMGNLALGRKLWADTTCGQNATELYCFYSENTDLTCRQPKCDKCNAAYPHLAHLPSAMADSSFRFPRTWWQSAEDVHREKIQLDLEAEFYFTHLIVMFKSPRPAAMVLDRSQDFGKTWKPYKYFATNCSATFGLEDDVVKKGAICTPKYSSPFPCTGGEVIFKALSPPYDTENPYSAKVQEQLKITNLRVQLLKRQSYPCQRNDLNEEPQHFTHYAIYDFIVKGSCFCNGHADQCIPVHGFRPVKAPGTFHMVHGKCMCKHNTAGSHCQHCAPLYNDRPWEAADGKTGAPNECRTCKCNGHADTCHFDVNVWEASGSRSGGVCDDCQHNTEGQYCQRCKPGFYRDLRRPFSAPDACKPCSCHPVGSAVLPANSVTFCDPSNGDCPCKPGVAGRRCDRCMVGYWGFGDYGCRPCDCAGSCDPITGDCISSHTDIDWCHEVPDFRPVHNKSEPAWEWEDAQGFSALLHSGKCECKEQTLGKAKAFCGMKYSYVLKIKILSAHDKGTHVEVNVKIKKVLKSTKLKIFRGKRTLYPESWTDRGCTCPILNPGLEYLAAGHEDIRTGKLIVNMKSFVQHWKPSLGRKVMDILKESAS

SEQ ID NO: 27 - DNA, 1884 bp, Homo sapiens
  CDS (1)..(1884)
atggggagctgcgcgcggctgctgctgctctggggccgcacggtggtggccgcaggactgagtggagtagctggagtgagttcccgctgtgaaaaagcctgcaaccctcggatgggaaatttggctttggggcgaaaactctgggcagacaccacctgcggtcagaatgctaccgaactgtactgcttctacagtgagaacacggatctgacttgtcggcagcccaaatgtgacaagtgcaatgctgcctatcctcacctggctcacctgccatctgccatggcagactcatccttccggtttcctcgcacatggtggcagtctgcggaggatgtgcacagagaaaagatccagttagacctggaagctgaattctacttcactcacctaattgtgatgttcaagtcccccaggccggctgccatggtgctggaccgctcccaggactttgggaaaacatggaagccttataagtactttgcgactaactgctccgctacatttggcctggaagatgatgttgtcaagaagggcgctatttgtactcctaaatactccagtccttttccatgcactggaggagaggttattttcaaagctttgtcaccaccatacgatacagagaacccttacagtgccaaagttcaggagcagctgaagatcaccaaccttcgcgtgcagctgctgaaacgacagtcttatccctgtcagagaaatgacctgaacgaagagcctcaacattttacacactatgcgatctatgatttcattgtcaagggcagctgcttctgcaatggccacgccgatcaatgcatacctgttcatggcttcagacctgtcaaggccccaggaacattccacatggtccatgggaagtgtatgtgtaagcacaacacagcaggcagccactgccagcactgtgccccgttatacaatgaccggccatgggaggcagctgatggcaaaacgggggctcccaacgagtgcagaacccgcaagtgtaatgggcatgctgatacctgtcacttcgacgttaatgtgtgggaggcatcagggaatcgtagtggtggtgtctgtgatgactgtcagcacaacacagaaggacagtattgccagaggtgcaagccaggcttctatcgtgacctgcggagacccttctcagctccagatgcttgcaaaccgtgttcctgccatccagtaggatcagctgtccttcctgccaactcagtgaccttctgcgaccccagcaatggtgactgcccttgcaagcctggggtggcagggcgacgttgtgacaggtgcatggtgggatactggggcttcggagactatggctgtcgaccatgtgactgtgcggggagctgtgaccctatcaccggagactgcatcagcagccacacagacatagactggtgtcatgaagttcctgacttccgtcccgtgcacaataagagcgaaccagcctgggagtgggaggatgcgcaggggttttctgcacttctacactcaggtaaatgcgaatgtaaggaacagacattaggaaaggccaaggcattctgtggaatgaaatattcatatgtgctaaaaataaagattttatcagctcatgataaaggtactcatgttgaggtcaatgtgaagattaaaaaggtcttaaaatctaccaaactgaagattttccgaggaaagcgaacattatatccagaatcatggacggacagaggatgcacttgtccaatcctcaatcctggtttggaataccttgcagcaggacatgaggatataagaacaggcaaactaattgtgaatatgaaaagctttgtccagcactggaaaccttctcttggaagaaaagtcatggatattttaaaagagagtgcaagt

SEQ ID NO: 28 - protein, 628 aa, Homo sapiens
MGSCARLLLLWGRTVVAAGLSGVAGVSSRCEKACNPRMGNLALGRKLWADTTCGQNATELYCFYSENTDLTCRQPKCDKCNAAYPHLAHLPSAMADSSFRFPRTWWQSAEDVHREKIQLDLEAEFYFTHLIVMFKSPRPAAMVLDRSQDFGKTWKPYKYFATNCSATFGLEDDVVKKGAICTPKYSSPFPCTGGEVIFKALSPPYDTENPYSAKVQEQLKITNLRVQLLKRQSYPCQRNDLNEEPQHFTHYAIYDFIVKGSCFCNGHADQCIPVHGFRPVKAPGTFHMVHGKCMCKHNTAGSHCQHCAPLYNDRPWEAADGKTGAPNECRTRKCNGHADTCHFDVNVWEASGNRSGGVCDDCQHNTEGQYCQRCKPGFYRDLRRPFSAPDACKPCSCHPVGSAVLPANSVTFCDPSNGDCPCKPGVAGRRCDRCMVGYWGFGDYGCRPCDCAGSCDPITGDCISSHTDIDWCHEVPDFRPVHNKSEPAWEWEDAQGFSALLHSGKCECKEQTLGKAKAFCGMKYSYVLKIKILSAHDKGTHVEVNVKIKKVLKSTKLKIFRGKRTLYPESWTDRGCTCPILNPGLEYLAAGHEDIRTGKLIVNMKSFVQHWKPSLGRKVMDILKESAS

SEQ ID NO: 29 - DNA, 1884 bp, Homo sapiens
  CDS (1)..(1884)
atggggagctgcgcgcggctgctgctgctctggggccgcacggtggtggccgcaggactgagtggagtagctggagtgagttcccgctgtgaaaaagcctgcaaccctcggatgggaaatttggctttggggcgaaaactctgggcagacaccacctgcggtcagaatgctaccgaactgtactgcttctacagtgagaacacggatctgacttgtcggcagcccaaatgtgacaagtgcaatgctgcctatcctcacctggctcacctgccatctgccatggcagactcatccttccggtttcctcgcacatggtggcagtctgcggaggatgtgcacagagaaaagatccagttagacctggaagctgaattctacttcactcacctaattgtgatgttcaagtcccccaggccggctgccatggtgctggaccgctcccaggactttgggaaaacatggaagccttataagtactttgcgactaactgctccgctacatttggcctggaagatgatgttgtcaagaagggcgctatttgtactcctaaatactccagtccttttccatgcactggaggagaggttattttcaaagctttgtcaccaccatacgatacagagaacccttacagtgccaaagttcaggagcagctgaagatcaccaaccttcgcgtgcagctgctgaaacgacagtcttatccctgtcagagaaatgacctgaacgaagagcctcaacattttacacactatgcgatctatgatttcattgtcaagggcagctgcttctgcaatggccacgccgatcaatgcatacctgttcatggcttcagacctgtcaaggccccaggaacattccacatggtccatgggaagtgtatgtgtaagcacaacacagcaggcagccactgccagcactgtgccccgttatacaatgaccggccatgggaggcagctgatggcaaaacgggggctcccaacgagtgcagagcctgcaagtgtaatgggcatgctgatacctgtcacttcgacgttaatgtgtgggaggcatcagggaatcgtagtggtggtgtctgtgatgactgtcagcacaacacagaaggacagtattgccagaggtgcaagccaggcttctatcgtgacctgcggagacccttctcagctccagatgcttgcaaaccgtgttcctgccatccagtaggatcagctgtccttcctgccaactcagtgaccttctgcgaccccagcaatggtgactgcccttgcaagcctggggtggcagggcgacgttgtgacaggtgcatggtgggatactggggcttcggagactatggctgtcgaccatgtgactgtgcggggagctgtgaccctatcaccggagactgcatcagcagccacacagacatagactggtatcatgaagttcctgacttccgtcccgtgcacaataagagcgaaccagcctgggagtgggaggatgcgcaggggttttctgcacttctacactcaggtaaatgcgaatgtaaggaacagacattaggaaaggccaaggcattctgtggaatgaaatattcatatgtgctaaaaataaagattttatcagctcatgataaaggtactcatgttgaggtcaatgtgaagattaaaaaggtcttaaaatctaccaaactgaagattttccgaggaaagcgaacattatatccagaatcatggacggacagaggatgcacttgtccaatcctcaatcctggtttggaataccttgcagcaggacatgaggatataagaacaggcaaactaattgtgaatatgaaaagctttgtccagcactggaaaccttctcttggaagaaaagtcatggatattttaaaagagagtgcaagt

SEQ ID NO: 30 - protein, 628 aa, Homo sapiens
MGSCARLLLLWGRTVVAAGLSGVAGVSSRCEKACNPRMGNLALGRKLWADTTCGQNATELYCFYSENTDLTCRQPKCDKCNAAYPHLAHLPSAMADSSFRFPRTWWQSAEDVHREKIQLDLEAEFYFTHLIVMFKSPRPAAMVLDRSQDFGKTWKPYKYFATNCSATFGLEDDVVKKGAICTPKYSSPFPCTGGEVIFKALSPPYDTENPYSAKVQEQLKITNLRVQLLKRQSYPCQRNDLNEEPQHFTHYAIYDFIVKGSCFCNGHADQCIPVHGFRPVKAPGTFHMVHGKCMCKHNTAGSHCQHCAPLYNDRPWEAADGKTGAPNECRACKCNGHADTCHFDVNVWEASGNRSGGVCDDCQHNTEGQYCQRCKPGFYRDLRRPFSAPDACKPCSCHPVGSAVLPANSVTFCDPSNGDCPCKPGVAGRRCDRCMVGYWGFGDYGCRPCDCAGSCDPITGDCISSHTDIDWYHEVPDFRPVHNKSEPAWEWEDAQGFSALLHSGKCECKEQTLGKAKAFCGMKYSYVLKIKILSAHDKGTHVEVNVKIKKVLKSTKLKIFRGKRTLYPESWTDRGCTCPILNPGLEYLAAGHEDIRTGKLIVNMKSFVQHWKPSLGRKVMDILKESAS

SEQ ID NO: 31 - DNA, 1884 bp, Homo sapiens
  CDS (1)..(1884)
atggggagctgcgcgcggctgctgctgctctggggccgcacggtggtggccgcaggactgagtggagtagctggagtgagttcccgctgtgaaaaagcctgcaaccctcggatgggaaatttggctttggggcgaaaactctgggcagacaccacctgcggtcagaatgctaccgaactgtactgcttctacagtgagaacacggatctgacttgtcggcagcccaaatgtgacaagtgcaatgctgcctatcctcacctggctcacctgccatctgccatggcagactcatccttccggtttcctcgcacatggtggcagtctgcggaggatgtgcacagagaaaagatccagttagacctggaagctgaattctacttcactcacctaattgtgatgttcaagtcccccaggccggctgccatggtgctggaccgctcccaggactttgggaaaacatggaagccttataagtactttgcgactaactgctccgctacatttggcctggaagatgatgttgtcaagaagggcgctatttgtactcctaaatactccagtccttttccatgcactggaggagaggttattttcaaagctttgtcaccaccatacgatacagagaacccttacagtgccaaagttcaggagcagctgaagatcaccaaccttcgcgtgcagctgctgaaacgacagtcttatccctgtcagagaaatgacctgaacgaagagcctcaacattttacacactatgcgatctatgatttcattgtcaagggcagctgcttctgcaatggccacgccgatcaatgcatacctgttcatggcttcagacctgtcaaggccccaggaacattccacatggtccatgggaagtgtatgtgtaagcacaacacagcaggcagccactgccagcactgtgccccgttatacaatgaccggccatgggaggcagctgatggcaaaacgggggctcccaacgagtgcagagcctgcaagtgtaatgggcatgctgatacctgtcacttcgacgttaatgtgtgggaggcatcagggagtcgtagtggtggtgtctgtgatgactgtcagcacaacacagaaggacagtattgccagaggtgcaagccaggcttctatcgtgacctgcggagacccttctcagctccagatgcttgcaaaccgtgttcctgccatccagtaggatcagctgtccttcctgccaactcagtgaccttctgcgaccccagcaatggtgactgcccttgcaagcctggggtggcagggcgacgttgtgacaggtgcatggtgggatactggggcttcggagactatggctgtcgaccatgtgactgtgcggggagctgtgaccctatcaccggagactgcatcagcagccacacagacatagactggtgtcatgaagttcctgacttccgtcccgtgcacaataagagcgaaccagcctgggagtgggaggatgcgcaggggttttctgcacttctacactcaggtaaatgcgaatgtaaggaacagacattaggaaaggccaaggcattctgtggaatgaaatattcatatgtgctaaaaataaagattttatcagctcatgataaaggtactcatgttgaggtcaatgtgaagattaaaaaggtcttaaaatctaccaaactgaagattttccgaggaaagcgaacattatatccagaatcatggacggacagaggatgcacttgtccaatcctcaatcctggtttggaataccttgcagcaggacatgaggatataagaacaggcaaactaattgtgaatatgaaaagctttgtccagcactggaaaccttctcttggaagaaaagtcatggatattttaaaagagagtgcaagt

SEQ ID NO: 32 - protein, 628 aa, Homo sapiens
MGSCARLLLLWGRTVVAAGLSGVAGVSSRCEKACNPRMGNLALGRKLWADTTCGQNATELYCFYSENTDLTCRQPKCDKCNAAYPHLAHLPSAMADSSFRFPRTWWQSAEDVHREKIQLDLEAEFYFTHLIVMFKSPRPAAMVLDRSQDFGKTWKPYKYFATNCSATFGLEDDVVKKGAICTPKYSSPFPCTGGEVIFKALSPPYDTENPYSAKVQEQLKITNLRVQLLKRQSYPCQRNDLNEEPQHFTHYAIYDFIVKGSCFCNGHADQCIPVHGFRPVKAPGTFHMVHGKCMCKHNTAGSHCQHCAPLYNDRPWEAADGKTGAPNECRACKCNGHADTCHFDVNVWEASGSRSGGVCDDCQHNTEGQYCQRCKPGFYRDLRRPFSAPDACKPCSCHPVGSAVLPANSVTFCDPSNGDCPCKPGVAGRRCDRCMVGYWGFGDYGCRPCDCAGSCDPITGDCISSHTDIDWCHEVPDFRPVHNKSEPAWEWEDAQGFSALLHSGKCECKEQTLGKAKAFCGMKYSYVLKIKILSAHDKGTHVEVNVKIKKVLKSTKLKIFRGKRTLYPESWTDRGCTCPILNPGLEYLAAGHEDIRTGKLIVNMKSFVQHWKPSLGRKVMDILKESAS

SEQ ID NO: 33 - DNA, 1884 bp, Homo sapiens
  CDS (1)..(1884)
atggggagctgcgcgcggctgctgctgctctggggccgcacggtggtggccgcaggactgagtggagtagctggagtgagttcccgctgtgaaaaagcctgcaaccctcggatgggaaatttggctttggggcgaaaactctgggcagacaccacctgcggtcagaatgctaccgaactgtactgcttctacagtgagaacacggatctgacttgtcggcagcccaaatgtgacaagtgcaatgctgcctatcctcacctggctcacctgccatctgccatggcagactcatccttccggtttcctcgcacatggtggcagtctgcggaggatgtgcacagagaaaagatccagttagacctggaagctgaattctacttcactcacctaattgtgatgttcaagtcccccaggccggctgccatggtgctggaccgctcccaggactttgggaaaacatggaagccttataagtactttgcgactaactgctccgctacatttggcctggaagatgatgttgtcaagaagggcgctatttgtactcctaaatactccagtccttttccatgcactggaggagaggttattttcaaagctttgtcaccaccatacgatacagagaacccttacagtgccaaagttcaggagcagctgaagatcaccaaccttcgcgtgcagctgctgaaacgacagtcttatccctgtcagagaaatgacctgaacgaagagcctcaacattttacacactatgcgatctatgatttcattgtcaagggcagctgcttctgcaatggccacgccgatcaatgcatacctgttcatggcttcagacctgtcaaggccccaggaacattccacatggtccatgggaagtgtatgtgtaagcacaacacagcaggcagccactgccagcactgtgccccgttatacaatgaccggccatgggaggcagctgatggcaaaacgggggctcccaacgagtgcagagcccgcaagtgtaatgggcatgctgatacctgtcacttcgacgttaatgtgtgggaggcatcagggaatcgtagtggtggtgtctgtgatgactgtcagcacaacacagaaggacagtattgccagaggtgcaagccaggcttctatcgtgacctgcggagacccttctcagctccagatgcttgcaaaccgtgttcctgccatccagtaggatcagctgtccttcctgccaactcagtgaccttctgcgaccccagcaatggtgactgcccttgcaagcctggggtggcagggcgacgttgtgacaggtgcatggtgggatactggggcttcggagactatggctgtcgaccatgtgactgtgcggggagctgtgaccctatcaccggagactgcatcagcagccacacagacatagactggtgtcatgaagttcctgacttccgtcccgtgcacaataagagcgaaccagcctgggagtgggaggatgcgcaggggttttctgcacttctacactcaggtaaatgcgaatgtaaggaacagacattaggaaaggccaaggcattctgtggaatgaaatattcatatgtgctaaaaataaagattttatcagctcatgataaaggtactcatgttgaggtcaatgtgaagattaaaaaggtcttaaaatctaccaaactgaagattttccgaggaaagcgaacattatatccagaatcatggacggacagaggatgcacttgtccaatcctcaatcctggtttggaataccttgcagcaggacatgaggatataagaacaggcaaactaattgtgaatatgaaaagctttgtccagcactggaaaccttctcttggaagaaaagtcatggatattttaaaagagagtgcaagt

SEQ ID NO: 34 - protein, 628 aa, Homo sapiens
MGSCARLLLLWGRTVVAAGLSGVAGVSSRCEKACNPRMGNLALGRKLWADTTCGQNATELYCFYSENTDLTCRQPKCDKCNAAYPHLAHLPSAMADSSFRFPRTWWQSAEDVHREKIQLDLEAEFYFTHLIVMFKSPRPAAMVLDRSQDFGKTWKPYKYFATNCSATFGLEDDVVKKGAICTPKYSSPFPCTGGEVIFKALSPPYDTENPYSAKVQEQLKITNLRVQLLKRQSYPCQRNDLNEEPQHFTHYAIYDFIVKGSCFCNGHADQCIPVHGFRPVKAPGTFHMVHGKCMCKHNTAGSHCQHCAPLYNDRPWEAADGKTGAPNECRARKCNGHADTCHFDVNVWEASGNRSGGVCDDCQHNTEGQYCQRCKPGFYRDLRRPFSAPDACKPCSCHPVGSAVLPANSVTFCDPSNGDCPCKPGVAGRRCDRCMVGYWGFGDYGCRPCDCAGSCDPITGDCISSHTDIDWCHEVPDFRPVHNKSEPAWEWEDAQGFSALLHSGKCECKEQTLGKAKAFCGMKYSYVLKIKILSAHDKGTHVEVNVKIKKVLKSTKLKIFRGKRTLYPESWTDRGCTCPILNPGLEYLAAGHEDIRTGKLIVNMKSFVQHWKPSLGRKVMDILKESAS

SEQ ID NO: 35 - DNA, 1884 bp, Homo sapiens
  CDS (1)..(1884)
atggggagctgcgcgcggctgctgctgctctggggccgcacggtggtggccgcaggactgagtggagtagctggagtgagttcccgctgtgaaaaagcctgcaaccctcggatgggaaatttggctttggggcgaaaactctgggcagacaccacctgcggtcagaatgctaccgaactgtactgcttctacagtgagaacacggatctgacttgtcggcagcccaaatgtgacaagtgcaatgctgcctatcctcacctggctcacctgccatctgccatggcagactcatccttccggtttcctcgcacatggtggcagtctgcggaggatgtgcacagagaaaagatccagttagacctggaagctgaattctacttcactcacctaattgtgatgttcaagtcccccaggccggctgccatggtgctggaccgctcccaggactttgggaaaacatggaagccttataagtactttgcgactaactgctccgctacatttggcctggaagatgatgttgtcaagaagggcgctatttgtactcctaaatactccagtccttttccatgcactggaggagaggttattttcaaagctttgtcaccaccatacgatacagagaacccttacagtgccaaagttcaggagcagctgaagatcaccaaccttcgcgtgcagctgctgaaacgacagtcttatccctgtcagagaaatgacctgaacgaagagcctcaacattttacacactatgcgatctatgatttcattgtcaagggcagctgcttctgcaatggccacgccgatcaatgcatacctgttcatggcttcagacctgtcaaggccccaggaacattccacatggtccatgggaagtgtatgtgtaagcacaacacagcaggcagccactgccagcactgtgccccgttatacaatgaccggccatgggaggcagctgatggcaaaacgggggctcccaacgagtgcagaacctgcaagtgtaatgggcatgctgatacctgtcacttcgacgttaatgtgtgggaggcatcagggaatcgtagtggtggtgtctgtgatgactgtcagcacaacacagaaggacagtattgccagaggtgcaagccaggcttctatcgtgacctgcggagacccttctcagctccagatgcttgcaaaccgtgttcctgccatccagtaggatcagctgtccttcctgccaactcagtgaccttctgcgaccccagcaatggtgactgcccttgcaagcctggggtggcagggcgacgttgtgacaggtgcatggtgggatactggggcttcggagactatggctgtcgaccatgtgactgtgcggggagctgtgaccctatcaccggagactgcatcagcagccacacagacatagactggtgtcatgaagttcctgacttccgtcccgtgcacaataagagcgaaccagcctgggagtgggaggatgcgcaggggttttctgcacttctacactcaggtaaatgcgaatgtaaggaacagacattaggaaaggccaaggcattctgtggaatgaaatattcatatgtgctaaaaataaagattttatcagctcatgataaaggtactcatgttgaggtcaatgtgaagattaaaaaggtcttaaaatctaccaaactgaagattttccgaggaaagcgaacattatatccagaatcatggacggacagaggatgcacttgtccaatcctcaatcctggtttggaataccttgcagcaggacatgaggatataagaacaggcaaactaattgtgaatatgaaaagctttgtccagcactggaaaccttctcttggaagaaaagtcatggatattttaaaagagagtgcaagt

SEQ ID NO: 36 - protein, 628 aa, Homo sapiens
MGSCARLLLLWGRTVVAAGLSGVAGVSSRCEKACNPRMGNLALGRKLWADTTCGQNATELYCFYSENTDLTCRQPKCDKCNAAYPHLAHLPSAMADSSFRFPRTWWQSAEDVHREKIQLDLEAEFYFTHLIVMFKSPRPAAMVLDRSQDFGKTWKPYKYFATNCSATFGLEDDVVKKGAICTPKYSSPFPCTGGEVIFKALSPPYDTENPYSAKVQEQLKITNLRVQLLKRQSYPCQRNDLNEEPQHFTHYAIYDFIVKGSCFCNGHADQCIPVHGFRPVKAPGTFHMVHGKCMCKHNTAGSHCQHCAPLYNDRPWEAADGKTGAPNECRTCKCNGHADTCHFDVNVWEASGNRSGGVCDDCQHNTEGQYCQRCKPGFYRDLRRPFSAPDACKPCSCHPVGSAVLPANSVTFCDPSNGDCPCKPGVAGRRCDRCMVGYWGFGDYGCRPCDCAGSCDPITGDCISSHTDIDWCHEVPDFRPVHNKSEPAWEWEDAQGFSALLHSGKCECKEQTLGKAKAFCGMKYSYVLKIKILSAHDKGTHVEVNVKIKKVLKSTKLKIFRGKRTLYPESWTDRGCTCPILNPGLEYLAAGHEDIRTGKLIVNMKSFVQHWKPSLGRKVMDILKESAS

SEQ ID NO: 37 - DNA, 1884 bp, Homo sapiens
  CDS (1)..(1884)
atggggagctgcgcgcggctgctgctgctctggggccgcacggtggtggccgcaggactgagtggagtagctggagtgagttcccgctgtgaaaaagcctgcaaccctcggatgggaaatttggctttggggcgaaaactctgggcagacaccacctgcggtcagaatgctaccgaactgtactgcttctacagtgagaacacggatctgacttgtcggcagcccaaatgtgacaagtgcaatgctgcctatcctcacctggctcacctgccatctgccatggcagactcatccttccggtttcctcgcacatggtggcagtctgcggaggatgtgcacagagaaaagatccagttagacctggaagctgaattctacttcactcacctaattgtgatgttcaagtcccccaggccggctgccatggtgctggaccgctcccaggactttgggaaaacatggaagccttataagtactttgcgactaactgctccgctacatttggcctggaagatgatgttgtcaagaagggcgctatttgtactcctaaatactccagtccttttccatgcactggaggagaggttattttcaaagctttgtcaccaccatacgatacagagaacccttacagtgccaaagttcaggagcagctgaagatcaccaaccttcgcgtgcagctgctgaaacgacagtcttatccctgtcagagaaatgacctgaacgaagagcctcaacattttacacactatgcgatctatgatttcattgtcaagggcagctgcttctgcaatggccacgccgatcaatgcatacctgttcatggcttcagacctgtcaaggccccaggaacattccacatggtccatgggaagtgtatgtgtaagcacaacacagcaggcagccactgccagcactgtgccccgttatacaatgaccggccatgggaggcagctgatggcaaaacgggggctcccaacgagtgcagagcctgcaagtgtaatgggcatgctgatacctgtcacttcgacgttaatgtgtgggaggcatcagggaatcgtagtggtggtgtctgtgatgactgtcagcacaacacagaaggacagtattgccagaggtgcaagccaggcttctatcgtgacctgcggagacccttctcagctccagatgcttgcaaaccgtgttcctgccatccagtaggatcagctgtccttcctgccaactcagtgaccttctgcgaccccagcaatggtgactgcccttgcaagcctggggtggcagggcgacgttgtgacaggtgcatggtgggatactggggcttcggagactatggctgtcgaccatgtgactgtgcggggagctgtgaccctatcaccggagactgcatcagcagccacacagacatagactggtgtcatgaagttcctgacttccgtcccgtgcacaataagagcgaaccagcctgggagtgggaggatgcgcaggggttttctgcacttctacactcaggtaaatgcgaatgtaaggaacagacattaggaaaggccaaggcattctgtggaatgaaatattcatatgtgctaaaaataaagattttatcagctcatgataaaggtactcatgttgaggtcaatgtgaagattaaaaaggtcttaaaatctaccaaactgaagattttccgaggaaagcgaacattatatccagaatcatggacggacagaggatgcacttgtccaatcctcaatcctggtttggaataccttgcagcaggacatgaggatataagaacaggcaaactaattgtgaatatgaaaagctttgtccagcactggaaaccttctcttggaagaaaagtcatggatattttaaaagagagtgcaagt

SEQ ID NO: 38 - protein, 628 aa, Homo sapiens
MGSCARLLLLWGRTVVAAGLSGVAGVSSRCEKACNPRMGNLALGRKLWADTTCGQNATELYCFYSENTDLTCRQPKCDKCNAAYPHLAHLPSAMADSSFRFPRTWWQSAEDVHREKIQLDLEAEFYFTHLIVMFKSPRPAAMVLDRSQDFGKTWKPYKYFATNCSATFGLEDDVVKKGAICTPKYSSPFPCTGGEVIFKALSPPYDTENPYSAKVQEQLKITNLRVQLLKRQSYPCQRNDLNEEPQHFTHYAIYDFIVKGSCFCNGHADQCIPVHGFRPVKAPGTFHMVHGKCMCKHNTAGSHCQHCAPLYNDRPWEAADGKTGAPNECRACKCNGHADTCHFDVNVWEASGNRSGGVCDDCQHNTEGQYCQRCKPGFYRDLRRPFSAPDACKPCSCHPVGSAVLPANSVTFCDPSNGDCPCKPGVAGRRCDRCMVGYWGFGDYGCRPCDCAGSCDPITGDCISSHTDIDWCHEVPDFRPVHNKSEPAWEWEDAQGFSALLHSGKCECKEQTLGKAKAFCGMKYSYVLKIKILSAHDKGTHVEVNVKIKKVLKSTKLKIFRGKRTLYPESWTDRGCTCPILNPGLEYLAAGHEDIRTGKLIVNMKSFVQHWKPSLGRKVMDILKESAS

SEQ ID NO: 39 - DNA, 1884 bp, Homo sapiens
  CDS (1)..(1884)
atggggagctgcgcgcggctgctgctgctctggggctgcacggtggtggccgcaggactgagtggagtagctggagtgagttcccgctgtgaaaaagcctgcaaccctcggatgggaaatttggctttggggcgaaaactctgggcagacaccacctgcggtcagaatgctaccgaactgtactgcttctacagtgagaacacggatctgacttgtcggcagcccaaatgtgacaagtgcaatgctgcctatcctcacctggctcacctgccatctgccatggcagactcatccttccggtttcctcgcacatggtggcagtctgcggaggatgtgcacagagaaaagatccagttagacctggaagctgaattctacttcactcacctaattgtgatgttcaagtcccccaggccggctgccatggtgctggaccgctcccaggactttgggaaaacatggaagccttataagtactttgcgactaactgctccgctacatttggcctggaagatgatgttgtcaagaagggcgctatttgtactcctaaatactccagtccttttccatgcactggaggagaggttattttcaaagctttgtcaccaccatacgatacagagaacccttacagtgccaaagttcaggagcagctgaagatcaccaaccttcgcgtgcagctgctgaaacgacagtcttatccctgtcagagaaatgacctgaacgaagagcctcaacattttacacactatgcgatctatgatttcattgtcaagggcagctgcttctgcaatggccacgccgatcaatgcatacctgttcatggcttcagacctgtcaaggccccaggaacattccacatggtccatgggaagtgtatgtgtaagcacaacacagcaggcagccactgccagcactgtgccccgttatacaatgaccggccatgggaggcagctgatggcaaaacgggggctcccaacgagtgcagaacccgcaagtgtaatgggcatgctgatacctgtcacttcgacgttaatgtgtgggaggcatcagggaatcgtagtggtggtgtctgtgatgactgtcagcacaacacagaaggacagtattgccagaggtgcaagccaggcttctatcgtgacctgcggagacccttctcagctccagatgcttgcaaaccgtgttcctgccatccagtaggatcagctgtccttcctgccaactcagtgaccttctgcgaccccagcaatggtgactgcccttgcaagcctggggtggcagggcgacgttgtgacaggtgcatggtgggatactggggcttcggagactatggctgtcgaccatgtgactgtgcggggagctgtgaccctatcaccggagactgcatcagcagccacacagacatagactggtatcatgaagttcctgacttccgtcccgtgcacaataagagcgaaccagcctgggagtgggaggatgcgcaggggttttctgcacttctacactcaggtaaatgcgaatgtaaggaacagacattaggaaaggccaaggcattctgtggaatgaaatattcatatgtgctaaaaataaagattttatcagctcatgataaaggtactcatgttgaggtcaatgtgaagattaaaaaggtcttaaaatctaccaaactgaagattttccgaggaaagcgaacattatatccagaatcatggacggacagaggatgcacttgtccaatcctcaatcctggtttggaataccttgcagcaggacatgaggatataagaacaggcaaactaattgtgaatatgaaaagctttgtccagcactggaaaccttctcttggaagaaaagtcatggatattttaaaagagagtgcaagt

SEQ ID NO: 40 - protein, 628 aa, Homo sapiens
MGSCARLLLLWGCTVVAAGLSGVAGVSSRCEKACNPRMGNLALGRKLWADTTCGQNATELYCFYSENTDLTCRQPKCDKCNAAYPHLAHLPSAMADSSFRFPRTWWQSAEDVHREKIQLDLEAEFYFTHLIVMFKSPRPAAMVLDRSQDFGKTWKPYKYFATNCSATFGLEDDVVKKGAICTPKYSSPFPCTGGEVIFKALSPPYDTENPYSAKVQEQLKITNLRVQLLKRQSYPCQRNDLNEEPQHFTHYAIYDFIVKGSCFCNGHADQCIPVHGFRPVKAPGTFHMVHGKCMCKHNTAGSHCQHCAPLYNDRPWEAADGKTGAPNECRTRKCNGHADTCHFDVNVWEASGNRSGGVCDDCQHNTEGQYCQRCKPGFYRDLRRPFSAPDACKPCSCHPVGSAVLPANSVTFCDPSNGDCPCKPGVAGRRCDRCMVGYWGFGDYGCRPCDCAGSCDPITGDCISSHTDIDWYHEVPDFRPVHNKSEPAWEWEDAQGFSALLHSGKCECKEQTLGKAKAFCGMKYSYVLKIKILSAHDKGTHVEVNVKIKKVLKSTKLKIFRGKRTLYPESWTDRGCTCPILNPGLEYLAAGHEDIRTGKLIVNMKSFVQHWKPSLGRKVMDILKESAS

SEQ ID NO: 41 - DNA, 1884 bp, Homo sapiens
  CDS (1)..(1884)
atggggagctgcgcgcggctgctgctgctctggggctgcacggtggtggccgcaggactgagtggagtagctggagtgagttcccgctgtgaaaaagcctgcaaccctcggatgggaaatttggctttggggcgaaaactctgggcagacaccacctgcggtcagaatgctaccgaactgtactgcttctacagtgagaacacggatctgacttgtcggcagcccaaatgtgacaagtgcaatgctgcctatcctcacctggctcacctgccatctgccatggcagactcatccttccggtttcctcgcacatggtggcagtctgcggaggatgtgcacagagaaaagatccagttagacctggaagctgaattctacttcactcacctaattgtgatgttcaagtcccccaggccggctgccatggtgctggaccgctcccaggactttgggaaaacatggaagccttataagtactttgcgactaactgctccgctacatttggcctggaagatgatgttgtcaagaagggcgctatttgtactcctaaatactccagtccttttccatgcactggaggagaggttattttcaaagctttgtcaccaccatacgatacagagaacccttacagtgccaaagttcaggagcagctgaagatcaccaaccttcgcgtgcagctgctgaaacgacagtcttatccctgtcagagaaatgacctgaacgaagagcctcaacattttacacactatgcgatctatgatttcattgtcaagggcagctgcttctgcaatggccacgccgatcaatgcatacctgttcatggcttcagacctgtcaaggccccaggaacattccacatggtccatgggaagtgtatgtgtaagcacaacacagcaggcagccactgccagcactgtgccccgttatacaatgaccggccatgggaggcagctgatggcaaaacgggggctcccaacgagtgcagagcccgcaagtgtaatgggcatgctgatacctgtcacttcgacgttaatgtgtgggaggcatcagggaatcgtagtggtggtgtctgtgatgactgtcagcacaacacagaaggacagtattgccagaggtgcaagccaggcttctatcgtgacctgcggagacccttctcagctccagatgcttgcaaaccgtgttcctgccatccagtaggatcagctgtccttcctgccaactcagtgaccttctgcgaccccagcaatggtgactgcccttgcaagcctggggtggcagggcgacgttgtgacaggtgcatggtgggatactggggcttcggagactatggctgtcgaccatgtgactgtgcggggagctgtgaccctatcaccggagactgcatcagcagccacacagacatagactggtatcatgaagttcctgacttccgtcccgtgcacaataagagcgaaccagcctgggagtgggaggatgcgcaggggttttctgcacttctacactcaggtaaatgcgaatgtaaggaacagacattaggaaaggccaaggcattctgtggaatgaaatattcatatgtgctaaaaataaagattttatcagctcatgataaaggtactcatgttgaggtcaatgtgaagattaaaaaggtcttaaaatctaccaaactgaagattttccgaggaaagcgaacattatatccagaatcatggacggacagaggatgcacttgtccaatcctcaatcctggtttggaataccttgcagcaggacatgaggatataagaacaggcaaactaattgtgaatatgaaaagctttgtccagcactggaaaccttctcttggaagaaaagtcatggatattttaaaagagagtgcaagt

SEQ ID NO: 42 - protein, 628 aa, Homo sapiens
MGSCARLLLLWGCTVVAAGLSGVAGVSSRCEKACNPRMGNLALGRKLWADTTCGQNATELYCFYSENTDLTCRQPKCDKCNAAYPHLAHLPSAMADSSFRFPRTWWQSAEDVHREKIQLDLEAEFYFTHLIVMFKSPRPAAMVLDRSQDFGKTWKPYKYFATNCSATFGLEDDVVKKGAICTPKYSSPFPCTGGEVIFKALSPPYDTENPYSAKVQEQLKITNLRVQLLKRQSYPCQRNDLNEEPQHFTHYAIYDFIVKGSCFCNGHADQCIPVHGFRPVKAPGTFHMVHGKCMCKHNTAGSHCQHCAPLYNDRPWEAADGKTGAPNECRARKCNGHADTCHFDVNVWEASGNRSGGVCDDCQHNTEGQYCQRCKPGFYRDLRRPFSAPDACKPCSCHPVGSAVLPANSVTFCDPSNGDCPCKPGVAGRRCDRCMVGYWGFGDYGCRPCDCAGSCDPITGDCISSHTDIDWYHEVPDFRPVHNKSEPAWEWEDAQGFSALLHSGKCECKEQTLGKAKAFCGMKYSYVLKIKILSAHDKGTHVEVNVKIKKVLKSTKLKIFRGKRTLYPESWTDRGCTCPILNPGLEYLAAGHEDIRTGKLIVNMKSFVQHWKPSLGRKVMDILKESAS

SEQ ID NO: 43 - DNA, 1884 bp, Homo sapiens
  CDS (1)..(1884)
atggggagctgcgcgcggctgctgctgctctggggctgcacggtggtggccgcaggactgagtggagtagctggagtgagttcccgctgtgaaaaagcctgcaaccctcggatgggaaatttggctttggggcgaaaactctgggcagacaccacctgcggtcagaatgctaccgaactgtactgcttctacagtgagaacacggatctgacttgtcggcagcccaaatgtgacaagtgcaatgctgcctatcctcacctggctcacctgccatctgccatggcagactcatccttccggtttcctcgcacatggtggcagtctgcggaggatgtgcacagagaaaagatccagttagacctggaagctgaattctacttcactcacctaattgtgatgttcaagtcccccaggccggctgccatggtgctggaccgctcccaggactttgggaaaacatggaagccttataagtactttgcgactaactgctccgctacatttggcctggaagatgatgttgtcaagaagggcgctatttgtactcctaaatactccagtccttttccatgcactggaggagaggttattttcaaagctttgtcaccaccatacgatacagagaacccttacagtgccaaagttcaggagcagctgaagatcaccaaccttcgcgtgcagctgctgaaacgacagtcttatccctgtcagagaaatgacctgaacgaagagcctcaacattttacacactatgcgatctatgatttcattgtcaagggcagctgcttctgcaatggccacgccgatcaatgcatacctgttcatggcttcagacctgtcaaggccccaggaacattccacatggtccatgggaagtgtatgtgtaagcacaacacagcaggcagccactgccagcactgtgccccgttatacaatgaccggccatgggaggcagctgatggcaaaacgggggctcccaacgagtgcagagcccgcaagtgtaatgggcatgctgatacctgtcacttcgacgttaatgtgtgggaggcatcagggagtcgtagtggtggtgtctgtgatgactgtcagcacaacacagaaggacagtattgccagaggtgcaagccaggcttctatcgtgacctgcggagacccttctcagctccagatgcttgcaaaccgtgttcctgccatccagtaggatcagctgtccttcctgccaactcagtgaccttctgcgaccccagcaatggtgactgcccttgcaagcctggggtggcagggcgacgttgtgacaggtgcatggtgggatactggggcttcggagactatggctgtcgaccatgtgactgtgcggggagctgtgaccctatcaccggagactgcatcagcagccacacagacatagactggtgtcatgaagttcctgacttccgtcccgtgcacaataagagcgaaccagcctgggagtgggaggatgcgcaggggttttctgcacttctacactcaggtaaatgcgaatgtaaggaacagacattaggaaaggccaaggcattctgtggaatgaaatattcatatgtgctaaaaataaagattttatcagctcatgataaaggtactcatgttgaggtcaatgtgaagattaaaaaggtcttaaaatctaccaaactgaagattttccgaggaaagcgaacattatatccagaatcatggacggacagaggatgcacttgtccaatcctcaatcctggtttggaataccttgcagcaggacatgaggatataagaacaggcaaactaattgtgaatatgaaaagctttgtccagcactggaaaccttctcttggaagaaaagtcatggatattttaaaagagagtgcaagt

SEQ ID NO: 44 - protein, 628 aa, Homo sapiens
MGSCARLLLLWGCTVVAAGLSGVAGVSSRCEKACNPRMGNLALGRKLWADTTCGQNATELYCFYSENTDLTCRQPKCDKCNAAYPHLAHLPSAMADSSFRFPRTWWQSAEDVHREKIQLDLEAEFYFTHLIVMFKSPRPAAMVLDRSQDFGKTWKPYKYFATNCSATFGLEDDVVKKGAICTPKYSSPFPCTGGEVIFKALSPPYDTENPYSAKVQEQLKITNLRVQLLKRQSYPCQRNDLNEEPQHFTHYAIYDFIVKGSCFCNGHADQCIPVHGFRPVKAPGTFHMVHGKCMCKHNTAGSHCQHCAPLYNDRPWEAADGKTGAPNECRARKCNGHADTCHFDVNVWEASGSRSGGVCDDCQHNTEGQYCQRCKPGFYRDLRRPFSAPDACKPCSCHPVGSAVLPANSVTFCDPSNGDCPCKPGVAGRRCDRCMVGYWGFGDYGCRPCDCAGSCDPITGDCISSHTDIDWCHEVPDFRPVHNKSEPAWEWEDAQGFSALLHSGKCECKEQTLGKAKAFCGMKYSYVLKIKILSAHDKGTHVEVNVKIKKVLKSTKLKIFRGKRTLYPESWTDRGCTCPILNPGLEYLAAGHEDIRTGKLIVNMKSFVQHWKPSLGRKVMDILKESAS

SEQ ID NO: 45 - DNA, 1884 bp, Homo sapiens
  CDS (1)..(1884)
atggggagctgcgcgcggctgctgctgctctggggctgcacggtggtggccgcaggactgagtggagtagctggagtgagttcccgctgtgaaaaagcctgcaaccctcggatgggaaatttggctttggggcgaaaactctgggcagacaccacctgcggtcagaatgctaccgaactgtactgcttctacagtgagaacacggatctgacttgtcggcagcccaaatgtgacaagtgcaatgctgcctatcctcacctggctcacctgccatctgccatggcagactcatccttccggtttcctcgcacatggtggcagtctgcggaggatgtgcacagagaaaagatccagttagacctggaagctgaattctacttcactcacctaattgtgatgttcaagtcccccaggccggctgccatggtgctggaccgctcccaggactttgggaaaacatggaagccttataagtactttgcgactaactgctccgctacatttggcctggaagatgatgttgtcaagaagggcgctatttgtactcctaaatactccagtccttttccatgcactggaggagaggttattttcaaagctttgtcaccaccatacgatacagagaacccttacagtgccaaagttcaggagcagctgaagatcaccaaccttcgcgtgcagctgctgaaacgacagtcttatccctgtcagagaaatgacctgaacgaagagcctcaacattttacacactatgcgatctatgatttcattgtcaagggcagctgcttctgcaatggccacgccgatcaatgcatacctgttcatggcttcagacctgtcaaggccccaggaacattccacatggtccatgggaagtgtatgtgtaagcacaacacagcaggcagccactgccagcactgtgccccgttatacaatgaccggccatgggaggcagctgatggcaaaacgggggctcccaacgagtgcagaacctgcaagtgtaatgggcatgctgatacctgtcacttcgacgttaatgtgtgggaggcatcagggaatcgtagtggtggtgtctgtgatgactgtcagcacaacacagaaggacagtattgccagaggtgcaagccaggcttctatcgtgacctgcggagacccttctcagctccagatgcttgcaaaccgtgttcctgccatccagtaggatcagctgtccttcctgccaactcagtgaccttctgcgaccccagcaatggtgactgcccttgcaagcctggggtggcagggcgacgttgtgacaggtgcatggtgggatactggggcttcggagactatggctgtcgaccatgtgactgtgcggggagctgtgaccctatcaccggagactgcatcagcagccacacagacatagactggtatcatgaagttcctgacttccgtcccgtgcacaataagagcgaaccagcctgggagtgggaggatgcgcaggggttttctgcacttctacactcaggtaaatgcgaatgtaaggaacagacattaggaaaggccaaggcattctgtggaatgaaatattcatatgtgctaaaaataaagattttatcagctcatgataaaggtactcatgttgaggtcaatgtgaagattaaaaaggtcttaaaatctaccaaactgaagattttccgaggaaagcgaacattatatccagaatcatggacggacagaggatgcacttgtccaatcctcaatcctggtttggaataccttgcagcaggacatgaggatataagaacaggcaaactaattgtgaatatgaaaagctttgtccagcactggaaaccttctcttggaagaaaagtcatggatattttaaaagagagtgcaagt

SEQ ID NO: 46 - protein, 628 aa, Homo sapiens
MGSCARLLLLWGCTVVAAGLSGVAGVSSRCEKACNPRMGNLALGRKLWADTTCGQNATELYCFYSENTDLTCRQPKCDKCNAAYPHLAHLPSAMADSSFRFPRTWWQSAEDVHREKIQLDLEAEFYFTHLIVMFKSPRPAAMVLDRSQDFGKTWKPYKYFATNCSATFGLEDDVVKKGAICTPKYSSPFPCTGGEVIFKALSPPYDTENPYSAKVQEQLKITNLRVQLLKRQSYPCQRNDLNEEPQHFTHYAIYDFIVKGSCFCNGHADQCIPVHGFRPVKAPGTFHMVHGKCMCKHNTAGSHCQHCAPLYNDRPWEAADGKTGAPNECRTCKCNGHADTCHFDVNVWEASGNRSGGVCDDCQHNTEGQYCQRCKPGFYRDLRRPFSAPDACKPCSCHPVGSAVLPANSVTFCDPSNGDCPCKPGVAGRRCDRCMVGYWGFGDYGCRPCDCAGSCDPITGDCISSHTDIDWYHEVPDFRPVHNKSEPAWEWEDAQGFSALLHSGKCECKEQTLGKAKAFCGMKYSYVLKIKILSAHDKGTHVEVNVKIKKVLKSTKLKIFRGKRTLYPESWTDRGCTCPILNPGLEYLAAGHEDIRTGKLIVNMKSFVQHWKPSLGRKVMDILKESAS

SEQ ID NO: 47 - DNA, 1884 bp, Homo sapiens
  CDS (1)..(1884)
atggggagctgcgcgcggctgctgctgctctggggctgcacggtggtggccgcaggactgagtggagtagctggagtgagttcccgctgtgaaaaagcctgcaaccctcggatgggaaatttggctttggggcgaaaactctgggcagacaccacctgcggtcagaatgctaccgaactgtactgcttctacagtgagaacacggatctgacttgtcggcagcccaaatgtgacaagtgcaatgctgcctatcctcacctggctcacctgccatctgccatggcagactcatccttccggtttcctcgcacatggtggcagtctgcggaggatgtgcacagagaaaagatccagttagacctggaagctgaattctacttcactcacctaattgtgatgttcaagtcccccaggccggctgccatggtgctggaccgctcccaggactttgggaaaacatggaagccttataagtactttgcgactaactgctccgctacatttggcctggaagatgatgttgtcaagaagggcgctatttgtactcctaaatactccagtccttttccatgcactggaggagaggttattttcaaagctttgtcaccaccatacgatacagagaacccttacagtgccaaagttcaggagcagctgaagatcaccaaccttcgcgtgcagctgctgaaacgacagtcttatccctgtcagagaaatgacctgaacgaagagcctcaacattttacacactatgcgatctatgatttcattgtcaagggcagctgcttctgcaatggccacgccgatcaatgcatacctgttcatggcttcagacctgtcaaggccccaggaacattccacatggtccatgggaagtgtatgtgtaagcacaacacagcaggcagccactgccagcactgtgccccgttatacaatgaccggccatgggaggcagctgatggcaaaacgggggctcccaacgagtgcagaacctgcaagtgtaatgggcatgctgatacctgtcacttcgacgttaatgtgtgggaggcatcagggagtcgtagtggtggtgtctgtgatgactgtcagcacaacacagaaggacagtattgccagaggtgcaagccaggcttctatcgtgacctgcggagacccttctcagctccagatgcttgcaaaccgtgttcctgccatccagtaggatcagctgtccttcctgccaactcagtgaccttctgcgaccccagcaatggtgactgcccttgcaagcctggggtggcagggcgacgttgtgacaggtgcatggtgggatactggggcttcggagactatggctgtcgaccatgtgactgtgcggggagctgtgaccctatcaccggagactgcatcagcagccacacagacatagactggtgtcatgaagttcctgacttccgtcccgtgcacaataagagcgaaccagcctgggagtgggaggatgcgcaggggttttctgcacttctacactcaggtaaatgcgaatgtaaggaacagacattaggaaaggccaaggcattctgtggaatgaaatattcatatgtgctaaaaataaagattttatcagctcatgataaaggtactcatgttgaggtcaatgtgaagattaaaaaggtcttaaaatctaccaaactgaagattttccgaggaaagcgaacattatatccagaatcatggacggacagaggatgcacttgtccaatcctcaatcctggtttggaataccttgcagcaggacatgaggatataagaacaggcaaactaattgtgaatatgaaaagctttgtccagcactggaaaccttctcttggaagaaaagtcatggatattttaaaagagagtgcaagt

SEQ ID NO: 48 - protein, 628 aa, Homo sapiens
MGSCARLLLLWGCTVVAAGLSGVAGVSSRCEKACNPRMGNLALGRKLWADTTCGQNATELYCFYSENTDLTCRQPKCDKCNAAYPHLAHLPSAMADSSFRFPRTWWQSAEDVHREKIQLDLEAEFYFTHLIVMFKSPRPAAMVLDRSQDFGKTWKPYKYFATNCSATFGLEDDVVKKGAICTPKYSSPFPCTGGEVIFKALSPPYDTENPYSAKVQEQLKITNLRVQLLKRQSYPCQRNDLNEEPQHFTHYAIYDFIVKGSCFCNGHADQCIPVHGFRPVKAPGTFHMVHGKCMCKHNTAGSHCQHCAPLYNDRPWEAADGKTGAPNECRTCKCNGHADTCHFDVNVWEASGSRSGGVCDDCQHNTEGQYCQRCKPGFYRDLRRPFSAPDACKPCSCHPVGSAVLPANSVTFCDPSNGDCPCKPGVAGRRCDRCMVGYWGFGDYGCRPCDCAGSCDPITGDCISSHTDIDWCHEVPDFRPVHNKSEPAWEWEDAQGFSALLHSGKCECKEQTLGKAKAFCGMKYSYVLKIKILSAHDKGTHVEVNVKIKKVLKSTKLKIFRGKRTLYPESWTDRGCTCPILNPGLEYLAAGHEDIRTGKLIVNMKSFVQHWKPSLGRKVMDILKESAS

SEQ ID NO: 49 - DNA, 1884 bp, Homo sapiens
  CDS (1)..(1884)
atggggagctgcgcgcggctgctgctgctctggggctgcacggtggtggccgcaggactgagtggagtagctggagtgagttcccgctgtgaaaaagcctgcaaccctcggatgggaaatttggctttggggcgaaaactctgggcagacaccacctgcggtcagaatgctaccgaactgtactgcttctacagtgagaacacggatctgacttgtcggcagcccaaatgtgacaagtgcaatgctgcctatcctcacctggctcacctgccatctgccatggcagactcatccttccggtttcctcgcacatggtggcagtctgcggaggatgtgcacagagaaaagatccagttagacctggaagctgaattctacttcactcacctaattgtgatgttcaagtcccccaggccggctgccatggtgctggaccgctcccaggactttgggaaaacatggaagccttataagtactttgcgactaactgctccgctacatttggcctggaagatgatgttgtcaagaagggcgctatttgtactcctaaatactccagtccttttccatgcactggaggagaggttattttcaaagctttgtcaccaccatacgatacagagaacccttacagtgccaaagttcaggagcagctgaagatcaccaaccttcgcgtgcagctgctgaaacgacagtcttatccctgtcagagaaatgacctgaacgaagagcctcaacattttacacactatgcgatctatgatttcattgtcaagggcagctgcttctgcaatggccacgccgatcaatgcatacctgttcatggcttcagacctgtcaaggccccaggaacattccacatggtccatgggaagtgtatgtgtaagcacaacacagcaggcagccactgccagcactgtgccccgttatacaatgaccggccatgggaggcagctgatggcaaaacgggggctcccaacgagtgcagaacccgcaagtgtaatgggcatgctgatacctgtcacttcgacgttaatgtgtgggaggcatcagggaatcgtagtggtggtgtctgtgatgactgtcagcacaacacagaaggacagtattgccagaggtgcaagccaggcttctatcgtgacctgcggagacccttctcagctccagatgcttgcaaaccgtgttcctgccatccagtaggatcagctgtccttcctgccaactcagtgaccttctgcgaccccagcaatggtgactgcccttgcaagcctggggtggcagggcgacgttgtgacaggtgcatggtgggatactggggcttcggagactatggctgtcgaccatgtgactgtgcggggagctgtgaccctatcaccggagactgcatcagcagccacacagacatagactggtgtcatgaagttcctgacttccgtcccgtgcacaataagagcgaaccagcctgggagtgggaggatgcgcaggggttttctgcacttctacactcaggtaaatgcgaatgtaaggaacagacattaggaaaggccaaggcattctgtggaatgaaatattcatatgtgctaaaaataaagattttatcagctcatgataaaggtactcatgttgaggtcaatgtgaagattaaaaaggtcttaaaatctaccaaactgaagattttccgaggaaagcgaacattatatccagaatcatggacggacagaggatgcacttgtccaatcctcaatcctggtttggaataccttgcagcaggacatgaggatataagaacaggcaaactaattgtgaatatgaaaagctttgtccagcactggaaaccttctcttggaagaaaagtcatggatattttaaaagagagtgcaagt

SEQ ID NO: 50 - protein, 628 aa, Homo sapiens
MGSCARLLLLWGCTVVAAGLSGVAGVSSRCEKACNPRMGNLALGRKLWADTTCGQNATELYCFYSENTDLTCRQPKCDKCNAAYPHLAHLPSAMADSSFRFPRTWWQSAEDVHREKIQLDLEAEFYFTHLIVMFKSPRPAAMVLDRSQDFGKTWKPYKYFATNCSATFGLEDDVVKKGAICTPKYSSPFPCTGGEVIFKALSPPYDTENPYSAKVQEQLKITNLRVQLLKRQSYPCQRNDLNEEPQHFTHYAIYDFIVKGSCFCNGHADQCIPVHGFRPVKAPGTFHMVHGKCMCKHNTAGSHCQHCAPLYNDRPWEAADGKTGAPNECRTRKCNGHADTCHFDVNVWEASGNRSGGVCDDCQHNTEGQYCQRCKPGFYRDLRRPFSAPDACKPCSCHPVGSAVLPANSVTFCDPSNGDCPCKPGVAGRRCDRCMVGYWGFGDYGCRPCDCAGSCDPITGDCISSHTDIDWCHEVPDFRPVHNKSEPAWEWEDAQGFSALLHSGKCECKEQTLGKAKAFCGMKYSYVLKIKILSAHDKGTHVEVNVKIKKVLKSTKLKIFRGKRTLYPESWTDRGCTCPILNPGLEYLAAGHEDIRTGKLIVNMKSFVQHWKPSLGRKVMDILKESAS

SEQ ID NO: 51 - DNA, 1884 bp, Homo sapiens
  CDS (1)..(1884)
atggggagctgcgcgcggctgctgctgctctggggctgcacggtggtggccgcaggactgagtggagtagctggagtgagttcccgctgtgaaaaagcctgcaaccctcggatgggaaatttggctttggggcgaaaactctgggcagacaccacctgcggtcagaatgctaccgaactgtactgcttctacagtgagaacacggatctgacttgtcggcagcccaaatgtgacaagtgcaatgctgcctatcctcacctggctcacctgccatctgccatggcagactcatccttccggtttcctcgcacatggtggcagtctgcggaggatgtgcacagagaaaagatccagttagacctggaagctgaattctacttcactcacctaattgtgatgttcaagtcccccaggccggctgccatggtgctggaccgctcccaggactttgggaaaacatggaagccttataagtactttgcgactaactgctccgctacatttggcctggaagatgatgttgtcaagaagggcgctatttgtactcctaaatactccagtccttttccatgcactggaggagaggttattttcaaagctttgtcaccaccatacgatacagagaacccttacagtgccaaagttcaggagcagctgaagatcaccaaccttcgcgtgcagctgctgaaacgacagtcttatccctgtcagagaaatgacctgaacgaagagcctcaacattttacacactatgcgatctatgatttcattgtcaagggcagctgcttctgcaatggccacgccgatcaatgcatacctgttcatggcttcagacctgtcaaggccccaggaacattccacatggtccatgggaagtgtatgtgtaagcacaacacagcaggcagccactgccagcactgtgccccgttatacaatgaccggccatgggaggcagctgatggcaaaacgggggctcccaacgagtgcagagcctgcaagtgtaatgggcatgctgatacctgtcacttcgacgttaatgtgtgggaggcatcagggaatcgtagtggtggtgtctgtgatgactgtcagcacaacacagaaggacagtattgccagaggtgcaagccaggcttctatcgtgacctgcggagacccttctcagctccagatgcttgcaaaccgtgttcctgccatccagtaggatcagctgtccttcctgccaactcagtgaccttctgcgaccccagcaatggtgactgcccttgcaagcctggggtggcagggcgacgttgtgacaggtgcatggtgggatactggggcttcggagactatggctgtcgaccatgtgactgtgcggggagctgtgaccctatcaccggagactgcatcagcagccacacagacatagactggtatcatgaagttcctgacttccgtcccgtgcacaataagagcgaaccagcctgggagtgggaggatgcgcaggggttttctgcacttctacactcaggtaaatgcgaatgtaaggaacagacattaggaaaggccaaggcattctgtggaatgaaatattcatatgtgctaaaaataaagattttatcagctcatgataaaggtactcatgttgaggtcaatgtgaagattaaaaaggtcttaaaatctaccaaactgaagattttccgaggaaagcgaacattatatccagaatcatggacggacagaggatgcacttgtccaatcctcaatcctggtttggaataccttgcagcaggacatgaggatataagaacaggcaaactaattgtgaatatgaaaagctttgtccagcactggaaaccttctcttggaagaaaagtcatggatattttaaaagagagtgcaagt

SEQ ID NO: 52 - protein, 628 aa, Homo sapiens
MGSCARLLLLWGCTVVAAGLSGVAGVSSRCEKACNPRMGNLALGRKLWADTTCGQNATELYCFYSENTDLTCRQPKCDKCNAAYPHLAHLPSAMADSSFRFPRTWWQSAEDVHREKIQLDLEAEFYFTHLIVMFKSPRPAAMVLDRSQDFGKTWKPYKYFATNCSATFGLEDDVVKKGAICTPKYSSPFPCTGGEVIFKALSPPYDTENPYSAKVQEQLKITNLRVQLLKRQSYPCQRNDLNEEPQHFTHYAIYDFIVKGSCFCNGHADQCIPVHGFRPVKAPGTFHMVHGKCMCKHNTAGSHCQHCAPLYNDRPWEAADGKTGAPNECRACKCNGHADTCHFDVNVWEASGNRSGGVCDDCQHNTEGQYCQRCKPGFYRDLRRPFSAPDACKPCSCHPVGSAVLPANSVTFCDPSNGDCPCKPGVAGRRCDRCMVGYWGFGDYGCRPCDCAGSCDPITGDCISSHTDIDWYHEVPDFRPVHNKSEPAWEWEDAQGFSALLHSGKCECKEQTLGKAKAFCGMKYSYVLKIKILSAHDKGTHVEVNVKIKKVLKSTKLKIFRGKRTLYPESWTDRGCTCPILNPGLEYLAAGHEDIRTGKLIVNMKSFVQHWKPSLGRKVMDILKESAS

SEQ ID NO: 53 - DNA, 1884 bp, Homo sapiens
  CDS (1)..(1884)
atggggagctgcgcgcggctgctgctgctctggggctgcacggtggtggccgcaggactgagtggagtagctggagtgagttcccgctgtgaaaaagcctgcaaccctcggatgggaaatttggctttggggcgaaaactctgggcagacaccacctgcggtcagaatgctaccgaactgtactgcttctacagtgagaacacggatctgacttgtcggcagcccaaatgtgacaagtgcaatgctgcctatcctcacctggctcacctgccatctgccatggcagactcatccttccggtttcctcgcacatggtggcagtctgcggaggatgtgcacagagaaaagatccagttagacctggaagctgaattctacttcactcacctaattgtgatgttcaagtcccccaggccggctgccatggtgctggaccgctcccaggactttgggaaaacatggaagccttataagtactttgcgactaactgctccgctacatttggcctggaagatgatgttgtcaagaagggcgctatttgtactcctaaatactccagtccttttccatgcactggaggagaggttattttcaaagctttgtcaccaccatacgatacagagaacccttacagtgccaaagttcaggagcagctgaagatcaccaaccttcgcgtgcagctgctgaaacgacagtcttatccctgtcagagaaatgacctgaacgaagagcctcaacattttacacactatgcgatctatgatttcattgtcaagggcagctgcttctgcaatggccacgccgatcaatgcatacctgttcatggcttcagacctgtcaaggccccaggaacattccacatggtccatgggaagtgtatgtgtaagcacaacacagcaggcagccactgccagcactgtgccccgttatacaatgaccggccatgggaggcagctgatggcaaaacgggggctcccaacgagtgcagagcctgcaagtgtaatgggcatgctgatacctgtcacttcgacgttaatgtgtgggaggcatcagggagtcgtagtggtggtgtctgtgatgactgtcagcacaacacagaaggacagtattgccagaggtgcaagccaggcttctatcgtgacctgcggagacccttctcagctccagatgcttgcaaaccgtgttcctgccatccagtaggatcagctgtccttcctgccaactcagtgaccttctgcgaccccagcaatggtgactgcccttgcaagcctggggtggcagggcgacgttgtgacaggtgcatggtgggatactggggcttcggagactatggctgtcgaccatgtgactgtgcggggagctgtgaccctatcaccggagactgcatcagcagccacacagacatagactggtgtcatgaagttcctgacttccgtcccgtgcacaataagagcgaaccagcctgggagtgggaggatgcgcaggggttttctgcacttctacactcaggtaaatgcgaatgtaaggaacagacattaggaaaggccaaggcattctgtggaatgaaatattcatatgtgctaaaaataaagattttatcagctcatgataaaggtactcatgttgaggtcaatgtgaagattaaaaaggtcttaaaatctaccaaactgaagattttccgaggaaagcgaacattatatccagaatcatggacggacagaggatgcacttgtccaatcctcaatcctggtttggaataccttgcagcaggacatgaggatataagaacaggcaaactaattgtgaatatgaaaagctttgtccagcactggaaaccttctcttggaagaaaagtcatggatattttaaaagagagtgcaagt

SEQ ID NO: 54 - protein, 628 aa, Homo sapiens
MGSCARLLLLWGCTVVAAGLSGVAGVSSRCEKACNPRMGNLALGRKLWADTTCGQNATELYCFYSENTDLTCRQPKCDKCNAAYPHLAHLPSAMADSSFRFPRTWWQSAEDVHREKIQLDLEAEFYFTHLIVMFKSPRPAAMVLDRSQDFGKTWKPYKYFATNCSATFGLEDDVVKKGAICTPKYSSPFPCTGGEVIFKALSPPYDTENPYSAKVQEQLKITNLRVQLLKRQSYPCQRNDLNEEPQHFTHYAIYDFIVKGSCFCNGHADQCIPVHGFRPVKAPGTFHMVHGKCMCKHNTAGSHCQHCAPLYNDRPWEAADGKTGAPNECRACKCNGHADTCHFDVNVWEASGSRSGGVCDDCQHNTEGQYCQRCKPGFYRDLRRPFSAPDACKPCSCHPVGSAVLPANSVTFCDPSNGDCPCKPGVAGRRCDRCMVGYWGFGDYGCRPCDCAGSCDPITGDCISSHTDIDWCHEVPDFRPVHNKSEPAWEWEDAQGFSALLHSGKCECKEQTLGKAKAFCGMKYSYVLKIKILSAHDKGTHVEVNVKIKKVLKSTKLKIFRGKRTLYPESWTDRGCTCPILNPGLEYLAAGHEDIRTGKLIVNMKSFVQHWKPSLGRKVMDILKESAS

SEQ ID NO: 55 - DNA, 1884 bp, Homo sapiens
  CDS (1)..(1884)
atggggagctgcgcgcggctgctgctgctctggggctgcacggtggtggccgcaggactgagtggagtagctggagtgagttcccgctgtgaaaaagcctgcaaccctcggatgggaaatttggctttggggcgaaaactctgggcagacaccacctgcggtcagaatgctaccgaactgtactgcttctacagtgagaacacggatctgacttgtcggcagcccaaatgtgacaagtgcaatgctgcctatcctcacctggctcacctgccatctgccatggcagactcatccttccggtttcctcgcacatggtggcagtctgcggaggatgtgcacagagaaaagatccagttagacctggaagctgaattctacttcactcacctaattgtgatgttcaagtcccccaggccggctgccatggtgctggaccgctcccaggactttgggaaaacatggaagccttataagtactttgcgactaactgctccgctacatttggcctggaagatgatgttgtcaagaagggcgctatttgtactcctaaatactccagtccttttccatgcactggaggagaggttattttcaaagctttgtcaccaccatacgatacagagaacccttacagtgccaaagttcaggagcagctgaagatcaccaaccttcgcgtgcagctgctgaaacgacagtcttatccctgtcagagaaatgacctgaacgaagagcctcaacattttacacactatgcgatctatgatttcattgtcaagggcagctgcttctgcaatggccacgccgatcaatgcatacctgttcatggcttcagacctgtcaaggccccaggaacattccacatggtccatgggaagtgtatgtgtaagcacaacacagcaggcagccactgccagcactgtgccccgttatacaatgaccggccatgggaggcagctgatggcaaaacgggggctcccaacgagtgcagagcccgcaagtgtaatgggcatgctgatacctgtcacttcgacgttaatgtgtgggaggcatcagggaatcgtagtggtggtgtctgtgatgactgtcagcacaacacagaaggacagtattgccagaggtgcaagccaggcttctatcgtgacctgcggagacccttctcagctccagatgcttgcaaaccgtgttcctgccatccagtaggatcagctgtccttcctgccaactcagtgaccttctgcgaccccagcaatggtgactgcccttgcaagcctggggtggcagggcgacgttgtgacaggtgcatggtgggatactggggcttcggagactatggctgtcgaccatgtgactgtgcggggagctgtgaccctatcaccggagactgcatcagcagccacacagacatagactggtgtcatgaagttcctgacttccgtcccgtgcacaataagagcgaaccagcctgggagtgggaggatgcgcaggggttttctgcacttctacactcaggtaaatgcgaatgtaaggaacagacattaggaaaggccaaggcattctgtggaatgaaatattcatatgtgctaaaaataaagattttatcagctcatgataaaggtactcatgttgaggtcaatgtgaagattaaaaaggtcttaaaatctaccaaactgaagattttccgaggaaagcgaacattatatccagaatcatggacggacagaggatgcacttgtccaatcctcaatcctggtttggaataccttgcagcaggacatgaggatataagaacaggcaaactaattgtgaatatgaaaagctttgtccagcactggaaaccttctcttggaagaaaagtcatggatattttaaaagagagtgcaagt

SEQ ID NO: 56 - protein, 628 aa, Homo sapiens
MGSCARLLLLWGCTVVAAGLSGVAGVSSRCEKACNPRMGNLALGRKLWADTTCGQNATELYCFYSENTDLTCRQPKCDKCNAAYPHLAHLPSAMADSSFRFPRTWWQSAEDVHREKIQLDLEAEFYFTHLIVMFKSPRPAAMVLDRSQDFGKTWKPYKYFATNCSATFGLEDDVVKKGAICTPKYSSPFPCTGGEVIFKALSPPYDTENPYSAKVQEQLKITNLRVQLLKRQSYPCQRNDLNEEPQHFTHYAIYDFIVKGSCFCNGHADQCIPVHGFRPVKAPGTFHMVHGKCMCKHNTAGSHCQHCAPLYNDRPWEAADGKTGAPNECRARKCNGHADTCHFDVNVWEASGNRSGGVCDDCQHNTEGQYCQRCKPGFYRDLRRPFSAPDACKPCSCHPVGSAVLPANSVTFCDPSNGDCPCKPGVAGRRCDRCMVGYWGFGDYGCRPCDCAGSCDPITGDCISSHTDIDWCHEVPDFRPVHNKSEPAWEWEDAQGFSALLHSGKCECKEQTLGKAKAFCGMKYSYVLKIKILSAHDKGTHVEVNVKIKKVLKSTKLKIFRGKRTLYPESWTDRGCTCPILNPGLEYLAAGHEDIRTGKLIVNMKSFVQHWKPSLGRKVMDILKESAS

SEQ ID NO: 57 - DNA, 1884 bp, Homo sapiens
  CDS (1)..(1884)
atggggagctgcgcgcggctgctgctgctctggggctgcacggtggtggccgcaggactgagtggagtagctggagtgagttcccgctgtgaaaaagcctgcaaccctcggatgggaaatttggctttggggcgaaaactctgggcagacaccacctgcggtcagaatgctaccgaactgtactgcttctacagtgagaacacggatctgacttgtcggcagcccaaatgtgacaagtgcaatgctgcctatcctcacctggctcacctgccatctgccatggcagactcatccttccggtttcctcgcacatggtggcagtctgcggaggatgtgcacagagaaaagatccagttagacctggaagctgaattctacttcactcacctaattgtgatgttcaagtcccccaggccggctgccatggtgctggaccgctcccaggactttgggaaaacatggaagccttataagtactttgcgactaactgctccgctacatttggcctggaagatgatgttgtcaagaagggcgctatttgtactcctaaatactccagtccttttccatgcactggaggagaggttattttcaaagctttgtcaccaccatacgatacagagaacccttacagtgccaaagttcaggagcagctgaagatcaccaaccttcgcgtgcagctgctgaaacgacagtcttatccctgtcagagaaatgacctgaacgaagagcctcaacattttacacactatgcgatctatgatttcattgtcaagggcagctgcttctgcaatggccacgccgatcaatgcatacctgttcatggcttcagacctgtcaaggccccaggaacattccacatggtccatgggaagtgtatgtgtaagcacaacacagcaggcagccactgccagcactgtgccccgttatacaatgaccggccatgggaggcagctgatggcaaaacgggggctcccaacgagtgcagaacctgcaagtgtaatgggcatgctgatacctgtcacttcgacgttaatgtgtgggaggcatcagggaatcgtagtggtggtgtctgtgatgactgtcagcacaacacagaaggacagtattgccagaggtgcaagccaggcttctatcgtgacctgcggagacccttctcagctccagatgcttgcaaaccgtgttcctgccatccagtaggatcagctgtccttcctgccaactcagtgaccttctgcgaccccagcaatggtgactgcccttgcaagcctggggtggcagggcgacgttgtgacaggtgcatggtgggatactggggcttcggagactatggctgtcgaccatgtgactgtgcggggagctgtgaccctatcaccggagactgcatcagcagccacacagacatagactggtgtcatgaagttcctgacttccgtcccgtgcacaataagagcgaaccagcctgggagtgggaggatgcgcaggggttttctgcacttctacactcaggtaaatgcgaatgtaaggaacagacattaggaaaggccaaggcattctgtggaatgaaatattcatatgtgctaaaaataaagattttatcagctcatgataaaggtactcatgttgaggtcaatgtgaagattaaaaaggtcttaaaatctaccaaactgaagattttccgaggaaagcgaacattatatccagaatcatggacggacagaggatgcacttgtccaatcctcaatcctggtttggaataccttgcagcaggacatgaggatataagaacaggcaaactaattgtgaatatgaaaagctttgtccagcactggaaaccttctcttggaagaaaagtcatggatattttaaaagagagtgcaagt

SEQ ID NO: 58 - protein, 628 aa, Homo sapiens
MGSCARLLLLWGCTVVAAGLSGVAGVSSRCEKACNPRMGNLALGRKLWADTTCGQNATELYCFYSENTDLTCRQPKCDKCNAAYPHLAHLPSAMADSSFRFPRTWWQSAEDVHREKIQLDLEAEFYFTHLIVMFKSPRPAAMVLDRSQDFGKTWKPYKYFATNCSATFGLEDDVVKKGAICTPKYSSPFPCTGGEVIFKALSPPYDTENPYSAKVQEQLKITNLRVQLLKRQSYPCQRNDLNEEPQHFTHYAIYDFIVKGSCFCNGHADQCIPVHGFRPVKAPGTFHMVHGKCMCKHNTAGSHCQHCAPLYNDRPWEAADGKTGAPNECRTCKCNGHADTCHFDVNVWEASGNRSGGVCDDCQHNTEGQYCQRCKPGFYRDLRRPFSAPDACKPCSCHPVGSAVLPANSVTFCDPSNGDCPCKPGVAGRRCDRCMVGYWGFGDYGCRPCDCAGSCDPITGDCISSHTDIDWCHEVPDFRPVHNKSEPAWEWEDAQGFSALLHSGKCECKEQTLGKAKAFCGMKYSYVLKIKILSAHDKGTHVEVNVKIKKVLKSTKLKIFRGKRTLYPESWTDRGCTCPILNPGLEYLAAGHEDIRTGKLIVNMKSFVQHWKPSLGRKVMDILKESAS

SEQ ID NO: 59 - DNA, 1884 bp, Homo sapiens
  CDS (1)..(1884)
atggggagctgcgcgcggctgctgctgctctggggctgcacggtggtggccgcaggactgagtggagtagctggagtgagttcccgctgtgaaaaagcctgcaaccctcggatgggaaatttggctttggggcgaaaactctgggcagacaccacctgcggtcagaatgctaccgaactgtactgcttctacagtgagaacacggatctgacttgtcggcagcccaaatgtgacaagtgcaatgctgcctatcctcacctggctcacctgccatctgccatggcagactcatccttccggtttcctcgcacatggtggcagtctgcggaggatgtgcacagagaaaagatccagttagacctggaagctgaattctacttcactcacctaattgtgatgttcaagtcccccaggccggctgccatggtgctggaccgctcccaggactttgggaaaacatggaagccttataagtactttgcgactaactgctccgctacatttggcctggaagatgatgttgtcaagaagggcgctatttgtactcctaaatactccagtccttttccatgcactggaggagaggttattttcaaagctttgtcaccaccatacgatacagagaacccttacagtgccaaagttcaggagcagctgaagatcaccaaccttcgcgtgcagctgctgaaacgacagtcttatccctgtcagagaaatgacctgaacgaagagcctcaacattttacacactatgcgatctatgatttcattgtcaagggcagctgcttctgcaatggccacgccgatcaatgcatacctgttcatggcttcagacctgtcaaggccccaggaacattccacatggtccatgggaagtgtatgtgtaagcacaacacagcaggcagccactgccagcactgtgccccgttatacaatgaccggccatgggaggcagctgatggcaaaacgggggctcccaacgagtgcagagcctgcaagtgtaatgggcatgctgatacctgtcacttcgacgttaatgtgtgggaggcatcagggaatcgtagtggtggtgtctgtgatgactgtcagcacaacacagaaggacagtattgccagaggtgcaagccaggcttctatcgtgacctgcggagacccttctcagctccagatgcttgcaaaccgtgttcctgccatccagtaggatcagctgtccttcctgccaactcagtgaccttctgcgaccccagcaatggtgactgcccttgcaagcctggggtggcagggcgacgttgtgacaggtgcatggtgggatactggggcttcggagactatggctgtcgaccatgtgactgtgcggggagctgtgaccctatcaccggagactgcatcagcagccacacagacatagactggtgtcatgaagttcctgacttccgtcccgtgcacaataagagcgaaccagcctgggagtgggaggatgcgcaggggttttctgcacttctacactcaggtaaatgcgaatgtaaggaacagacattaggaaaggccaaggcattctgtggaatgaaatattcatatgtgctaaaaataaagattttatcagctcatgataaaggtactcatgttgaggtcaatgtgaagattaaaaaggtcttaaaatctaccaaactgaagattttccgaggaaagcgaacattatatccagaatcatggacggacagaggatgcacttgtccaatcctcaatcctggtttggaataccttgcagcaggacatgaggatataagaacaggcaaactaattgtgaatatgaaaagctttgtccagcactggaaaccttctcttggaagaaaagtcatggatattttaaaagagagtgcaagt

SEQ ID NO: 60 - protein, 628 aa, Homo sapiens
MGSCARLLLLWGCTVVAAGLSGVAGVSSRCEKACNPRMGNLALGRKLWADTTCGQNATELYCFYSENTDLTCRQPKCDKCNAAYPHLAHLPSAMADSSFRFPRTWWQSAEDVHREKIQLDLEAEFYFTHLIVMFKSPRPAAMVLDRSQDFGKTWKPYKYFATNCSATFGLEDDVVKKGAICTPKYSSPFPCTGGEVIFKALSPPYDTENPYSAKVQEQLKITNLRVQLLKRQSYPCQRNDLNEEPQHFTHYAIYDFIVKGSCFCNGHADQCIPVHGFRPVKAPGTFHMVHGKCMCKHNTAGSHCQHCAPLYNDRPWEAADGKTGAPNECRACKCNGHADTCHFDVNVWEASGNRSGGVCDDCQHNTEGQYCQRCKPGFYRDLRRPFSAPDACKPCSCHPVGSAVLPANSVTFCDPSNGDCPCKPGVAGRRCDRCMVGYWGFGDYGCRPCDCAGSCDPITGDCISSHTDIDWCHEVPDFRPVHNKSEPAWEWEDAQGFSALLHSGKCECKEQTLGKAKAFCGMKYSYVLKIKILSAHDKGTHVEVNVKIKKVLKSTKLKIFRGKRTLYPESWTDRGCTCPILNPGLEYLAAGHEDIRTGKLIVNMKSFVQHWKPSLGRKVMDILKESAS

SEQ ID NO: 61 - DNA, 1887 bp, Homo sapiens
  CDS (1)..(1884)
atggggagctgcgcgcggctgctgctgctctggggctgcacggtggtggccgcaggactgagtggagtagctggagtgagttcccgctgtgaaaaagcctgcaaccctcggatgggaaatttggctttggggcgaaaactctgggcagacaccacctgcggtcagaatgctaccgaactgtactgcttctacagtgagaacaaggatctgacttgtcggcagcccaaatgtgacaagtgcaatgctgcctatcctcacctggctcacctgccatctgccatggcagactcatccttccggtttcctcgcacatggtggcagtctgcggaggatgtgcacagagaaaagatccagttagacctggaagctgaattctacttcactcacctaattgtgatgttcaagtcccccaggccggctgccatggtgctggaccgctcccaggactttgggaaaacatggaagccttataagtactttgcgactaactgctccgctacatttggcctggaagatgatgttgtcaagaagggcgctatttgtacttctaaatactccagtccttttccatgcactggaggagaggttattttcaaagctttgtcaccaccacacgatacagagaacccttacagtgccaaagttcaggagcagctgaagatcaccaaccttcgcgtgcagctgctgaaacgacagtcttgtccctgtcagagaaatgacctgaacgaagagcctcaacattttacacactatgcgatctatgatttcattgtcaagggcagctgcttctgcaatggccacgccgatcaatgcatacctgttcatggcttcagacctgtcaaggccccaggaacattccacatggtccatgggaagtgtatgtgtaagcacaacacagcaggcagccactgccagcactgtgccccgttatacaatgaccggccatgggaggcagctgatggcaaaacgggggctcccaacgagtgcagaacctgcaagtgtaatgggcatgctgatacctgtcacttcgacgttaatgtgtgggaggcatcagggaatcgtagtggtggtgtctgtgatgactgtcagcacaacacagaaggacagtattgccagaggtgcaagccaggcttctatcgtgacctgcggagacccttctcagctccagatgcttgcaaaccgtgttcctgccatccagtaggatcagctgtccttcctgccaactcagtgaccttctgcgaccccagcaatggtgactgcccttgcaagcctggggtggcagggcgacgttgtgacaggtgcatggtgggatactggggcttcggagactatggctgtcgaccatgtgactgtgcggggagctgtgaccctatcaccggagactgcatcagcagccacacagacatagactggtgtcatgaagttcctgacttccgtcccgtgcacaataagagcgaaccagcctgggagtgggaggatgcgcaggggttttctgcacttctacactcaggtaaatgcgaatgtaaggaacagacattaggaaatgccaaggcattctgtggaatgaaatattcatatgtgctaaaaataaagattttatcagctcatgataaaggtactcatgttgaggtcaatgtgaagattaaaaaggtcttaaaatctaccaaactgaagattttccgaggaaagcgaacattatatccagaatcatggacggacagaggatgcacttgtccaatcctcaatcctggtttggaataccttgtagcaggacatgaggatataagaacaggcaaactaattgtgaatatgaaaagctttgtccagcactggaaaccttctcttggaagaaaagtcatggatattttaaaaagagagtgcaagtag

SEQ ID NO: 62 - protein, 628 aa, Homo sapiens
MGSCARLLLLWGCTVVAAGLSGVAGVSSRCEKACNPRMGNLALGRKLWADTTCGQNATELYCFYSENKDLTCRQPKCDKCNAAYPHLAHLPSAMADSSFRFPRTWWQSAEDVHREKIQLDLEAEFYFTHLIVMFKSPRPAAMVLDRSQDFGKTWKPYKYFATNCSATFGLEDDVVKKGAICTSKYSSPFPCTGGEVIFKALSPPHDTENPYSAKVQEQLKITNLRVQLLKRQSCPCQRNDLNEEPQHFTHYAIYDFIVKGSCFCNGHADQCIPVHGFRPVKAPGTFHMVHGKCMCKHNTAGSHCQHCAPLYNDRPWEAADGKTGAPNECRTCKCNGHADTCHFDVNVWEASGNRSGGVCDDCQHNTEGQYCQRCKPGFYRDLRRPFSAPDACKPCSCHPVGSAVLPANSVTFCDPSNGDCPCKPGVAGRRCDRCMVGYWGFGDYGCRPCDCAGSCDPITGDCISSHTDIDWCHEVPDFRPVHNKSEPAWEWEDAQGFSALLHSGKCECKEQTLGNAKAFCGMKYSYVLKIKILSAHDKGTHVEVNVKIKKVLKSTKLKIFRGKRTLYPESWTDRGCTCPILNPGLEYLVAGHEDIRTGKLIVNMKSFVQHWKPSLGRKVMDILKRECK

SEQ ID NO: 63 - DNA, 1887 bp, Homo sapiens
  CDS (1)..(1887)
atggggagctgcgcgcggctgctgctgctctggggctgcacggtggtggccgcaggactgagtggagtagctggagtgagttcccgctgtgaaaaagcctgcaaccctcggatgggaaatttggctttggggcgaaaactctgggcagacaccacctgcggtcagaatgctaccgaactgtactgcttctacagtgagaacaaggatctgacttgtcggcagcccaaatgtgacaagtgcaatgctgcctatcctcacctggctcacctgccatctgccatggcagactcatccttccggtttcctcgcacatggtggcagtctgcggaggatgtgcacagagaaaagatccagttagacctggaagctgaattctacttcactcacctaattgtgatgttcaagtcccccaggccggctgccatggtgctggaccgctcccaggactttgggaaaacatggaagccttataagtactttgcgactaactgctccgctacatttggcctggaagatgatgttgtcaagaagggcgctatttgtacttctaaatactccagtccttttccatgcactggaggagaggttattttcaaagctttgtcaccaccacacgatacagagaacccttacagtgccaaagttcaggagcagctgaagatcaccaaccttcgcgtgcagctgctgaaacgacagtcttgtccctgtcagagaaatgacctgaacgaagagcctcaacattttacacactatgcgatctatgatttcattgtcaagggcagctgcttctgcaatggccacgccgatcaatgcatacctgttcatggcttcagacctgtcaaggccccaggaacattccacatggtccatgggaagtgtatgtgtaagcacaacacagcaggcagccactgccagcactgtgccccgttatacaatgaccggccatgggaggcagctgatggcaaaacgggggctcccaacgagtgcagagcccgcaagtgtaatgggcatgctgatacctgtcacttcgacgttaatgtgtgggaggcatcagggaatcgtagtggtggtgtctgtgatgactgtcagcacaacacagaaggacagtattgccagaggtgcaagccaggcttctatcgtgacctgcggagacccttctcagctccagatgcttgcaaaccgtgttcctgccatccagtaggatcagctgtccttcctgccaactcagtgaccttctgcgaccccagcaatggtgactgcccttgcaagcctggggtggcagggcgacgttgtgacaggtgcatggtgggatactggggcttcggagactatggctgtcgaccatgtgactgtgcggggagctgtgaccctatcaccggagactgcatcagcagccacacagacatagactggtgtcatgaagttcctgacttccgtcccgtgcacaataagagcgaaccagcctgggagtgggaggatgcgcaggggttttctgcacttctacactcaggtaaatgcgaatgtaaggaacagacattaggaaatgccaaggcattctgtggaatgaaatattcatatgtgctaaaaataaagattttatcagctcatgataaaggtactcatgttgaggtcaatgtgaagattaaaaaggtcttaaaatctaccaaactgaagattttccgaggaaagcgaacattatatccagaatcatggacggacagaggatgcacttgtccaatcctcaatcctggtttggaataccttgtagcaggacatgaggatataagaacaggcaaactaattgtgaatatgaaaagctttgtccagcactggaaaccttctcttggaagaaaagtcatggatattttaaaaagagagtgcaagtag

SEQ ID NO: 64 - protein, 628 aa, Homo sapiens
MGSCARLLLLWGCTVVAAGLSGVAGVSSRCEKACNPRMGNLALGRKLWADTTCGQNATELYCFYSENKDLTCRQPKCDKCNAAYPHLAHLPSAMADSSFRFPRTWWQSAEDVHREKIQLDLEAEFYFTHLIVMFKSPRPAAMVLDRSQDFGKTWKPYKYFATNCSATFGLEDDVVKKGAICTSKYSSPFPCTGGEVIFKALSPPHDTENPYSAKVQEQLKITNLRVQLLKRQSCPCQRNDLNEEPQHFTHYAIYDFIVKGSCFCNGHADQCIPVHGFRPVKAPGTFHMVHGKCMCKHNTAGSHCQHCAPLYNDRPWEAADGKTGAPNECRARKCNGHADTCHFDVNVWEASGNRSGGVCDDCQHNTEGQYCQRCKPGFYRDLRRPFSAPDACKPCSCHPVGSAVLPANSVTFCDPSNGDCPCKPGVAGRRCDRCMVGYWGFGDYGCRPCDCAGSCDPITGDCISSHTDIDWCHEVPDFRPVHNKSEPAWEWEDAQGFSALLHSGKCECKEQTLGNAKAFCGMKYSYVLKIKILSAHDKGTHVEVNVKIKKVLKSTKLKIFRGKRTLYPESWTDRGCTCPILNPGLEYLVAGHEDIRTGKLIVNMKSFVQHWKPSLGRKVMDILKRECK

SEQ ID NO: 65 - DNA, 1887 bp, Homo sapiens
  CDS (1)..(1887)
atggggagctgcgcgcggctgctgctgctctggggctgcacggtggtggccgcaggactgagtggagtagctggagtgagttcccgctgtgaaaaagcctgcaaccctcggatgggaaatttggctttggggcgaaaactctgggcagacaccacctgcggtcagaatgctaccgaactgtactgcttctacagtgagaacaaggatctgacttgtcggcagcccaaatgtgacaagtgcaatgctgcctatcctcacctggctcacctgccatctgccatggcagactcatccttccggtttcctcgcacatggtggcagtctgcggaggatgtgcacagagaaaagatccagttagacctggaagctgaattctacttcactcacctaattgtgatgttcaagtcccccaggccggctgccatggtgctggaccgctcccaggactttgggaaaacatggaagccttataagtactttgcgactaactgctccgctacatttggcctggaagatgatgttgtcaagaagggcgctatttgtacttctaaatactccagtccttttccatgcactggaggagaggttattttcaaagctttgtcaccaccacacgatacagagaacccttacagtgccaaagttcaggagcagctgaagatcaccaaccttcgcgtgcagctgctgaaacgacagtcttgtccctgtcagagaaatgacctgaacgaagagcctcaacattttacacactatgcgatctatgatttcattgtcaagggcagctgcttctgcaatggccacgccgatcaatgcatacctgttcatggcttcagacctgtcaaggccccaggaacattccacatggtccatgggaagtgtatgtgtaagcacaacacagcaggcagccactgccagcactgtgccccgttatacaatgaccggccatgggaggcagctgatggcaaaacgggggctcccaacgagtgcagaacccgcaagtgtaatgggcatgctgatacctgtcacttcgacgttaatgtgtgggaggcatcagggaatcgtagtggtggtgtctgtgatgactgtcagcacaacacagaaggacagtattgccagaggtgcaagccaggcttctatcgtgacctgcggagacccttctcagctccagatgcttgcaaaccgtgttcctgccatccagtaggatcagctgtccttcctgccaactcagtgaccttctgcgaccccagcaatggtgactgcccttgcaagcctggggtggcagggcgacgttgtgacaggtgcatggtgggatactggggcttcggagactatggctgtcgaccatgtgactgtgcggggagctgtgaccctatcaccggagactgcatcagcagccacacagacatagactggtgtcatgaagttcctgacttccgtcccgtgcacaataagagcgaaccagcctgggagtgggaggatgcgcaggggttttctgcacttctacactcaggtaaatgcgaatgtaaggaacagacattaggaaatgccaaggcattctgtggaatgaaatattcatatgtgctaaaaataaagattttatcagctcatgataaaggtactcatgttgaggtcaatgtgaagattaaaaaggtcttaaaatctaccaaactgaagattttccgaggaaagcgaacattatatccagaatcatggacggacagaggatgcacttgtccaatcctcaatcctggtttggaataccttgtagcaggacatgaggatataagaacaggcaaactaattgtgaatatgaaaagctttgtccagcactggaaaccttctcttggaagaaaagtcatggatattttaaaaagagagtgcaagtag

SEQ ID NO: 66 - protein, 628 aa, Homo sapiens
MGSCARLLLLWGCTVVAAGLSGVAGVSSRCEKACNPRMGNLALGRKLWADTTCGQNATELYCFYSENKDLTCRQPKCDKCNAAYPHLAHLPSAMADSSFRFPRTWWQSAEDVHREKIQLDLEAEFYFTHLIVMFKSPRPAAMVLDRSQDFGKTWKPYKYFATNCSATFGLEDDVVKKGAICTSKYSSPFPCTGGEVIFKALSPPHDTENPYSAKVQEQLKITNLRVQLLKRQSCPCQRNDLNEEPQHFTHYAIYDFIVKGSCFCNGHADQCIPVHGFRPVKAPGTFHMVHGKCMCKHNTAGSHCQHCAPLYNDRPWEAADGKTGAPNECRTRKCNGHADTCHFDVNVWEASGNRSGGVCDDCQHNTEGQYCQRCKPGFYRDLRRPFSAPDACKPCSCHPVGSAVLPANSVTFCDPSNGDCPCKPGVAGRRCDRCMVGYWGFGDYGCRPCDCAGSCDPITGDCISSHTDIDWCHEVPDFRPVHNKSEPAWEWEDAQGFSALLHSGKCECKEQTLGNAKAFCGMKYSYVLKIKILSAHDKGTHVEVNVKIKKVLKSTKLKIFRGKRTLYPESWTDRGCTCPILNPGLEYLVAGHEDIRTGKLIVNMKSFVQHWKPSLGRKVMDILKRECK

SEQ ID NO: 67 - DNA, 1887 bp, Homo sapiens
  CDS (1)..(1887)
atggggagctgcgcgcggctgctgctgctctggggctgcacggtggtggccgcaggactgagtggagtagctggagtgagttcccgctgtgaaaaagcctgcaaccctcggatgggaaatttggctttggggcgaaaactctgggcagacaccacctgcggtcagaatgctaccgaactgtactgcttctacagtgagaacaaggatctgacttgtcggcagcccaaatgtgacaagtgcaatgctgcctatcctcacctggctcacctgccatctgccatggcagactcatccttccggtttcctcgcacatggtggcagtctgcggaggatgtgcacagagaaaagatccagttagacctggaagctgaattctacttcactcacctaattgtgatgttcaagtcccccaggccggctgccatggtgctggaccgctcccaggactttgggaaaacatggaagccttataagtactttgcgactaactgctccgctacatttggcctggaagatgatgttgtcaagaagggcgctatttgtacttctaaatactccagtccttttccatgcactggaggagaggttattttcaaagctttgtcaccaccacacgatacagagaacccttacagtgccaaagttcaggagcagctgaagatcaccaaccttcgcgtgcagctgctgaaacgacagtcttgtccctgtcagagaaatgacctgaacgaagagcctcaacattttacacactatgcgatctatgatttcattgtcaagggcagctgcttctgcaatggccacgccgatcaatgcatacctgttcatggcttcagacctgtcaaggccccaggaacattccacatggtccatgggaagtgtatgtgtaagcacaacacagcaggcagccactgccagcactgtgccccgttatacaatgaccggccatgggaggcagctgatggcaaaacgggggctcccaacgagtgcagaacctgcaagtgtaatgggcatgctgatacctgtcacttcgacgttaatgtgtgggaggcatcagggagtcgtagtggtggtgtctgtgatgactgtcagcacaacacagaaggacagtattgccagaggtgcaagccaggcttctatcgtgacctgcggagacccttctcagctccagatgcttgcaaaccgtgttcctgccatccagtaggatcagctgtccttcctgccaactcagtgaccttctgcgaccccagcaatggtgactgcccttgcaagcctggggtggcagggcgacgttgtgacaggtgcatggtgggatactggggcttcggagactatggctgtcgaccatgtgactgtgcggggagctgtgaccctatcaccggagactgcatcagcagccacacagacatagactggtgtcatgaagttcctgacttccgtcccgtgcacaataagagcgaaccagcctgggagtgggaggatgcgcaggggttttctgcacttctacactcaggtaaatgcgaatgtaaggaacagacattaggaaatgccaaggcattctgtggaatgaaatattcatatgtgctaaaaataaagattttatcagctcatgataaaggtactcatgttgaggtcaatgtgaagattaaaaaggtcttaaaatctaccaaactgaagattttccgaggaaagcgaacattatatccagaatcatggacggacagaggatgcacttgtccaatcctcaatcctggtttggaataccttgtagcaggacatgaggatataagaacaggcaaactaattgtgaatatgaaaagctttgtccagcactggaaaccttctcttggaagaaaagtcatggatattttaaaaagagagtgcaagtag

SEQ ID NO: 68 - protein, 628 aa, Homo sapiens
MGSCARLLLLWGCTVVAAGLSGVAGVSSRCEKACNPRMGNLALGRKLWADTTCGQNATELYCFYSENKDLTCRQPKCDKCNAAYPHLAHLPSAMADSSFRFPRTWWQSAEDVHREKIQLDLEAEFYFTHLIVMFKSPRPAAMVLDRSQDFGKTWKPYKYFATNCSATFGLEDDVVKKGAICTSKYSSPFPCTGGEVIFKALSPPHDTENPYSAKVQEQLKITNLRVQLLKRQSCPCQRNDLNEEPQHFTHYAIYDFIVKGSCFCNGHADQCIPVHGFRPVKAPGTFHMVHGKCMCKHNTAGSHCQHCAPLYNDRPWEAADGKTGAPNECRTCKCNGHADTCHFDVNVWEASGSRSGGVCDDCQHNTEGQYCQRCKPGFYRDLRRPFSAPDACKPCSCHPVGSAVLPANSVTFCDPSNGDCPCKPGVAGRRCDRCMVGYWGFGDYGCRPCDCAGSCDPITGDCISSHTDIDWCHEVPDFRPVHNKSEPAWEWEDAQGFSALLHSGKCECKEQTLGNAKAFCGMKYSYVLKIKILSAHDKGTHVEVNVKIKKVLKSTKLKIFRGKRTLYPESWTDRGCTCPILNPGLEYLVAGHEDIRTGKLIVNMKSFVQHWKPSLGRKVMDILKRECK

SEQ ID NO: 69 - DNA, 1887 bp, Homo sapiens
  CDS (1)..(1887)
atggggagctgcgcgcggctgctgctgctctggggctgcacggtggtggccgcaggactgagtggagtagctggagtgagttcccgctgtgaaaaagcctgcaaccctcggatgggaaatttggctttggggcgaaaactctgggcagacaccacctgcggtcagaatgctaccgaactgtactgcttctacagtgagaacaaggatctgacttgtcggcagcccaaatgtgacaagtgcaatgctgcctatcctcacctggctcacctgccatctgccatggcagactcatccttccggtttcctcgcacatggtggcagtctgcggaggatgtgcacagagaaaagatccagttagacctggaagctgaattctacttcactcacctaattgtgatgttcaagtcccccaggccggctgccatggtgctggaccgctcccaggactttgggaaaacatggaagccttataagtactttgcgactaactgctccgctacatttggcctggaagatgatgttgtcaagaagggcgctatttgtacttctaaatactccagtccttttccatgcactggaggagaggttattttcaaagctttgtcaccaccacacgatacagagaacccttacagtgccaaagttcaggagcagctgaagatcaccaaccttcgcgtgcagctgctgaaacgacagtcttgtccctgtcagagaaatgacctgaacgaagagcctcaacattttacacactatgcgatctatgatttcattgtcaagggcagctgcttctgcaatggccacgccgatcaatgcatacctgttcatggcttcagacctgtcaaggccccaggaacattccacatggtccatgggaagtgtatgtgtaagcacaacacagcaggcagccactgccagcactgtgccccgttatacaatgaccggccatgggaggcagctgatggcaaaacgggggctcccaacgagtgcagaacctgcaagtgtaatgggcatgctgatacctgtcacttcgacgttaatgtgtgggaggcatcagggaatcgtagtggtggtgtctgtgatgactgtcagcacaacacagaaggacagtattgccagaggtgcaagccaggcttctatcgtgacctgcggagacccttctcagctccagatgcttgcaaaccgtgttcctgccatccagtaggatcagctgtccttcctgccaactcagtgaccttctgcgaccccagcaatggtgactgcccttgcaagcctggggtggcagggcgacgttgtgacaggtgcatggtgggatactggggcttcggagactatggctgtcgaccatgtgactgtgcggggagctgtgaccctatcaccggagactgcatcagcagccacacagacatagactggtatcatgaagttcctgacttccgtcccgtgcacaataagagcgaaccagcctgggagtgggaggatgcgcaggggttttctgcacttctacactcaggtaaatgcgaatgtaaggaacagacattaggaaatgccaaggcattctgtggaatgaaatattcatatgtgctaaaaataaagattttatcagctcatgataaaggtactcatgttgaggtcaatgtgaagattaaaaaggtcttaaaatctaccaaactgaagattttccgaggaaagcgaacattatatccagaatcatggacggacagaggatgcacttgtccaatcctcaatcctggtttggaataccttgtagcaggacatgaggatataagaacaggcaaactaattgtgaatatgaaaagctttgtccagcactggaaaccttctcttggaagaaaagtcatggatattttaaaaagagagtgcaagtag

SEQ ID NO: 70 - protein, 628 aa, Homo sapiens
MGSCARLLLLWGCTVVAAGLSGVAGVSSRCEKACNPRMGNLALGRKLWADTTCGQNATELYCFYSENKDLTCRQPKCDKCNAAYPHLAHLPSAMADSSFRFPRTWWQSAEDVHREKIQLDLEAEFYFTHLIVMFKSPRPAAMVLDRSQDFGKTWKPYKYFATNCSATFGLEDDVVKKGAICTSKYSSPFPCTGGEVIFKALSPPHDTENPYSAKVQEQLKITNLRVQLLKRQSCPCQRNDLNEEPQHFTHYAIYDFIVKGSCFCNGHADQCIPVHGFRPVKAPGTFHMVHGKCMCKHNTAGSHCQHCAPLYNDRPWEAADGKTGAPNECRTCKCNGHADTCHFDVNVWEASGNRSGGVCDDCQHNTEGQYCQRCKPGFYRDLRRPFSAPDACKPCSCHPVGSAVLPANSVTFCDPSNGDCPCKPGVAGRRCDRCMVGYWGFGDYGCRPCDCAGSCDPITGDCISSHTDIDWYHEVPDFRPVHNKSEPAWEWEDAQGFSALLHSGKCECKEQTLGNAKAFCGMKYSYVLKIKILSAHDKGTHVEVNVKIKKVLKSTKLKIFRGKRTLYPESWTDRGCTCPILNPGLEYLVAGHEDIRTGKLIVNMKSFVQHWKPSLGRKVMDILKRECK

SEQ ID NO: 71 - DNA, 1887 bp, Homo sapiens
  CDS (1)..(1887)
atggggagctgcgcgcggctgctgctgctctggggctgcacggtggtggccgcaggactgagtggagtagctggagtgagttcccgctgtgaaaaagcctgcaaccctcggatgggaaatttggctttggggcgaaaactctgggcagacaccacctgcggtcagaatgctaccgaactgtactgcttctacagtgagaacaaggatctgacttgtcggcagcccaaatgtgacaagtgcaatgctgcctatcctcacctggctcacctgccatctgccatggcagactcatccttccggtttcctcgcacatggtggcagtctgcggaggatgtgcacagagaaaagatccagttagacctggaagctgaattctacttcactcacctaattgtgatgttcaagtcccccaggccggctgccatggtgctggaccgctcccaggactttgggaaaacatggaagccttataagtactttgcgactaactgctccgctacatttggcctggaagatgatgttgtcaagaagggcgctatttgtacttctaaatactccagtccttttccatgcactggaggagaggttattttcaaagctttgtcaccaccacacgatacagagaacccttacagtgccaaagttcaggagcagctgaagatcaccaaccttcgcgtgcagctgctgaaacgacagtcttgtccctgtcagagaaatgacctgaacgaagagcctcaacattttacacactatgcgatctatgatttcattgtcaagggcagctgcttctgcaatggccacgccgatcaatgcatacctgttcatggcttcagacctgtcaaggccccaggaacattccacatggtccatgggaagtgtatgtgtaagcacaacacagcaggcagccactgccagcactgtgccccgttatacaatgaccggccatgggaggcagctgatggcaaaacgggggctcccaacgagtgcagaacccgcaagtgtaatgggcatgctgatacctgtcacttcgacgttaatgtgtgggaggcatcagggagtcgtagtggtggtgtctgtgatgactgtcagcacaacacagaaggacagtattgccagaggtgcaagccaggcttctatcgtgacctgcggagacccttctcagctccagatgcttgcaaaccgtgttcctgccatccagtaggatcagctgtccttcctgccaactcagtgaccttctgcgaccccagcaatggtgactgcccttgcaagcctggggtggcagggcgacgttgtgacaggtgcatggtgggatactggggcttcggagactatggctgtcgaccatgtgactgtgcggggagctgtgaccctatcaccggagactgcatcagcagccacacagacatagactggtgtcatgaagttcctgacttccgtcccgtgcacaataagagcgaaccagcctgggagtgggaggatgcgcaggggttttctgcacttctacactcaggtaaatgcgaatgtaaggaacagacattaggaaatgccaaggcattctgtggaatgaaatattcatatgtgctaaaaataaagattttatcagctcatgataaaggtactcatgttgaggtcaatgtgaagattaaaaaggtcttaaaatctaccaaactgaagattttccgaggaaagcgaacattatatccagaatcatggacggacagaggatgcacttgtccaatcctcaatcctggtttggaataccttgtagcaggacatgaggatataagaacaggcaaactaattgtgaatatgaaaagctttgtccagcactggaaaccttctcttggaagaaaagtcatggatattttaaaaagagagtgcaagtag

SEQ ID NO: 72 - protein, 628 aa, Homo sapiens
MGSCARLLLLWGCTVVAAGLSGVAGVSSRCEKACNPRMGNLALGRKLWADTTCGQNATELYCFYSENKDLTCRQPKCDKCNAAYPHLAHLPSAMADSSFRFPRTWWQSAEDVHREKIQLDLEAEFYFTHLIVMFKSPRPAAMVLDRSQDFGKTWKPYKYFATNCSATFGLEDDVVKKGAICTSKYSSPFPCTGGEVIFKALSPPHDTENPYSAKVQEQLKITNLRVQLLKRQSCPCQRNDLNEEPQHFTHYAIYDFIVKGSCFCNGHADQCIPVHGFRPVKAPGTFHMVHGKCMCKHNTAGSHCQHCAPLYNDRPWEAADGKTGAPNECRTRKCNGHADTCHFDVNVWEASGSRSGGVCDDCQHNTEGQYCQRCKPGFYRDLRRPFSAPDACKPCSCHPVGSAVLPANSVTFCDPSNGDCPCKPGVAGRRCDRCMVGYWGFGDYGCRPCDCAGSCDPITGDCISSHTDIDWCHEVPDFRPVHNKSEPAWEWEDAQGFSALLHSGKCECKEQTLGNAKAFCGMKYSYVLKIKILSAHDKGTHVEVNVKIKKVLKSTKLKIFRGKRTLYPESWTDRGCTCPILNPGLEYLVAGHEDIRTGKLIVNMKSFVQHWKPSLGRKVMDILKRECK

SEQ ID NO: 73 - DNA, 1887 bp, Homo sapiens
  CDS (1)..(1887)
atggggagctgcgcgcggctgctgctgctctggggctgcacggtggtggccgcaggactgagtggagtagctggagtgagttcccgctgtgaaaaagcctgcaaccctcggatgggaaatttggctttggggcgaaaactctgggcagacaccacctgcggtcagaatgctaccgaactgtactgcttctacagtgagaacaaggatctgacttgtcggcagcccaaatgtgacaagtgcaatgctgcctatcctcacctggctcacctgccatctgccatggcagactcatccttccggtttcctcgcacatggtggcagtctgcggaggatgtgcacagagaaaagatccagttagacctggaagctgaattctacttcactcacctaattgtgatgttcaagtcccccaggccggctgccatggtgctggaccgctcccaggactttgggaaaacatggaagccttataagtactttgcgactaactgctccgctacatttggcctggaagatgatgttgtcaagaagggcgctatttgtacttctaaatactccagtccttttccatgcactggaggagaggttattttcaaagctttgtcaccaccacacgatacagagaacccttacagtgccaaagttcaggagcagctgaagatcaccaaccttcgcgtgcagctgctgaaacgacagtcttgtccctgtcagagaaatgacctgaacgaagagcctcaacattttacacactatgcgatctatgatttcattgtcaagggcagctgcttctgcaatggccacgccgatcaatgcatacctgttcatggcttcagacctgtcaaggccccaggaacattccacatggtccatgggaagtgtatgtgtaagcacaacacagcaggcagccactgccagcactgtgccccgttatacaatgaccggccatgggaggcagctgatggcaaaacgggggctcccaacgagtgcagaacccgcaagtgtaatgggcatgctgatacctgtcacttcgacgttaatgtgtgggaggcatcagggaatcgtagtggtggtgtctgtgatgactgtcagcacaacacagaaggacagtattgccagaggtgcaagccaggcttctatcgtgacctgcggagacccttctcagctccagatgcttgcaaaccgtgttcctgccatccagtaggatcagctgtccttcctgccaactcagtgaccttctgcgaccccagcaatggtgactgcccttgcaagcctggggtggcagggcgacgttgtgacaggtgcatggtgggatactggggcttcggagactatggctgtcgaccatgtgactgtgcggggagctgtgaccctatcaccggagactgcatcagcagccacacagacatagactggtatcatgaagttcctgacttccgtcccgtgcacaataagagcgaaccagcctgggagtgggaggatgcgcaggggttttctgcacttctacactcaggtaaatgcgaatgtaaggaacagacattaggaaatgccaaggcattctgtggaatgaaatattcatatgtgctaaaaataaagattttatcagctcatgataaaggtactcatgttgaggtcaatgtgaagattaaaaaggtcttaaaatctaccaaactgaagattttccgaggaaagcgaacattatatccagaatcatggacggacagaggatgcacttgtccaatcctcaatcctggtttggaataccttgtagcaggacatgaggatataagaacaggcaaactaattgtgaatatgaaaagctttgtccagcactggaaaccttctcttggaagaaaagtcatggatattttaaaaagagagtgcaagtag

SEQ ID NO: 74 - protein, 628 aa, Homo sapiens
MGSCARLLLLWGCTVVAAGLSGVAGVSSRCEKACNPRMGNLALGRKLWADTTCGQNATELYCFYSENKDLTCRQPKCDKCNAAYPHLAHLPSAMADSSFRFPRTWWQSAEDVHREKIQLDLEAEFYFTHLIVMFKSPRPAAMVLDRSQDFGKTWKPYKYFATNCSATFGLEDDVVKKGAICTSKYSSPFPCTGGEVIFKALSPPHDTENPYSAKVQEQLKITNLRVQLLKRQSCPCQRNDLNEEPQHFTHYAIYDFIVKGSCFCNGHADQCIPVHGFRPVKAPGTFHMVHGKCMCKHNTAGSHCQHCAPLYNDRPWEAADGKTGAPNECRTRKCNGHADTCHFDVNVWEASGNRSGGVCDDCQHNTEGQYCQRCKPGFYRDLRRPFSAPDACKPCSCHPVGSAVLPANSVTFCDPSNGDCPCKPGVAGRRCDRCMVGYWGFGDYGCRPCDCAGSCDPITGDCISSHTDIDWYHEVPDFRPVHNKSEPAWEWEDAQGFSALLHSGKCECKEQTLGNAKAFCGMKYSYVLKIKILSAHDKGTHVEVNVKIKKVLKSTKLKIFRGKRTLYPESWTDRGCTCPILNPGLEYLVAGHEDIRTGKLIVNMKSFVQHWKPSLGRKVMDILKRECK

SEQ ID NO: 75 - DNA, 1887 bp, Homo sapiens
  CDS (1)..(1887)
atggggagctgcgcgcggctgctgctgctctggggctgcacggtggtggccgcaggactgagtggagtagctggagtgagttcccgctgtgaaaaagcctgcaaccctcggatgggaaatttggctttggggcgaaaactctgggcagacaccacctgcggtcagaatgctaccgaactgtactgcttctacagtgagaacaaggatctgacttgtcggcagcccaaatgtgacaagtgcaatgctgcctatcctcacctggctcacctgccatctgccatggcagactcatccttccggtttcctcgcacatggtggcagtctgcggaggatgtgcacagagaaaagatccagttagacctggaagctgaattctacttcactcacctaattgtgatgttcaagtcccccaggccggctgccatggtgctggaccgctcccaggactttgggaaaacatggaagccttataagtactttgcgactaactgctccgctacatttggcctggaagatgatgttgtcaagaagggcgctatttgtacttctaaatactccagtccttttccatgcactggaggagaggttattttcaaagctttgtcaccaccacacgatacagagaacccttacagtgccaaagttcaggagcagctgaagatcaccaaccttcgcgtgcagctgctgaaacgacagtcttgtccctgtcagagaaatgacctgaacgaagagcctcaacattttacacactatgcgatctatgatttcattgtcaagggcagctgcttctgcaatggccacgccgatcaatgcatacctgttcatggcttcagacctgtcaaggccccaggaacattccacatggtccatgggaagtgtatgtgtaagcacaacacagcaggcagccactgccagcactgtgccccgttatacaatgaccggccatgggaggcagctgatggcaaaacgggggctcccaacgagtgcagaacctgcaagtgtaatgggcatgctgatacctgtcacttcgacgttaatgtgtgggaggcatcagggagtcgtagtggtggtgtctgtgatgactgtcagcacaacacagaaggacagtattgccagaggtgcaagccaggcttctatcgtgacctgcggagacccttctcagctccagatgcttgcaaaccgtgttcctgccatccagtaggatcagctgtccttcctgccaactcagtgaccttctgcgaccccagcaatggtgactgcccttgcaagcctggggtggcagggcgacgttgtgacaggtgcatggtgggatactggggcttcggagactatggctgtcgaccatgtgactgtgcggggagctgtgaccctatcaccggagactgcatcagcagccacacagacatagactggtatcatgaagttcctgacttccgtcccgtgcacaataagagcgaaccagcctgggagtgggaggatgcgcaggggttttctgcacttctacactcaggtaaatgcgaatgtaaggaacagacattaggaaatgccaaggcattctgtggaatgaaatattcatatgtgctaaaaataaagattttatcagctcatgataaaggtactcatgttgaggtcaatgtgaagattaaaaaggtcttaaaatctaccaaactgaagattttccgaggaaagcgaacattatatccagaatcatggacggacagaggatgcacttgtccaatcctcaatcctggtttggaataccttgtagcaggacatgaggatataagaacaggcaaactaattgtgaatatgaaaagctttgtccagcactggaaaccttctcttggaagaaaagtcatggatattttaaaaagagagtgcaagtag

SEQ ID NO: 76 - protein, 628 aa, Homo sapiens
MGSCARLLLLWGCTVVAAGLSGVAGVSSRCEKACNPRMGNLALGRKLWADTTCGQNATELYCFYSENKDLTCRQPKCDKCNAAYPHLAHLPSAMADSSFRFPRTWWQSAEDVHREKIQLDLEAEFYFTHLIVMFKSPRPAAMVLDRSQDFGKTWKPYKYFATNCSATFGLEDDVVKKGAICTSKYSSPFPCTGGEVIFKALSPPHDTENPYSAKVQEQLKITNLRVQLLKRQSCPCQRNDLNEEPQHFTHYAIYDFIVKGSCFCNGHADQCIPVHGFRPVKAPGTFHMVHGKCMCKHNTAGSHCQHCAPLYNDRPWEAADGKTGAPNECRTCKCNGHADTCHFDVNVWEASGSRSGGVCDDCQHNTEGQYCQRCKPGFYRDLRRPFSAPDACKPCSCHPVGSAVLPANSVTFCDPSNGDCPCKPGVAGRRCDRCMVGYWGFGDYGCRPCDCAGSCDPITGDCISSHTDIDWYHEVPDFRPVHNKSEPAWEWEDAQGFSALLHSGKCECKEQTLGNAKAFCGMKYSYVLKIKILSAHDKGTHVEVNVKIKKVLKSTKLKIFRGKRTLYPESWTDRGCTCPILNPGLEYLVAGHEDIRTGKLIVNMKSFVQHWKPSLGRKVMDILKRECK

SEQ ID NO: 77 - DNA, 1887 bp, Homo sapiens
  CDS (1)..(1887)
atggggagctgcgcgcggctgctgctgctctggggctgcacggtggtggccgcaggactgagtggagtagctggagtgagttcccgctgtgaaaaagcctgcaaccctcggatgggaaatttggctttggggcgaaaactctgggcagacaccacctgcggtcagaatgctaccgaactgtactgcttctacagtgagaacaaggatctgacttgtcggcagcccaaatgtgacaagtgcaatgctgcctatcctcacctggctcacctgccatctgccatggcagactcatccttccggtttcctcgcacatggtggcagtctgcggaggatgtgcacagagaaaagatccagttagacctggaagctgaattctacttcactcacctaattgtgatgttcaagtcccccaggccggctgccatggtgctggaccgctcccaggactttgggaaaacatggaagccttataagtactttgcgactaactgctccgctacatttggcctggaagatgatgttgtcaagaagggcgctatttgtacttctaaatactccagtccttttccatgcactggaggagaggttattttcaaagctttgtcaccaccacacgatacagagaacccttacagtgccaaagttcaggagcagctgaagatcaccaaccttcgcgtgcagctgctgaaacgacagtcttgtccctgtcagagaaatgacctgaacgaagagcctcaacattttacacactatgcgatctatgatttcattgtcaagggcagctgcttctgcaatggccacgccgatcaatgcatacctgttcatggcttcagacctgtcaaggccccaggaacattccacatggtccatgggaagtgtatgtgtaagcacaacacagcaggcagccactgccagcactgtgccccgttatacaatgaccggccatgggaggcagctgatggcaaaacgggggctcccaacgagtgcagaacccgcaagtgtaatgggcatgctgatacctgtcacttcgacgttaatgtgtgggaggcatcagggagtcgtagtggtggtgtctgtgatgactgtcagcacaacacagaaggacagtattgccagaggtgcaagccaggcttctatcgtgacctgcggagacccttctcagctccagatgcttgcaaaccgtgttcctgccatccagtaggatcagctgtccttcctgccaactcagtgaccttctgcgaccccagcaatggtgactgcccttgcaagcctggggtggcagggcgacgttgtgacaggtgcatggtgggatactggggcttcggagactatggctgtcgaccatgtgactgtgcggggagctgtgaccctatcaccggagactgcatcagcagccacacagacatagactggtatcatgaagttcctgacttccgtcccgtgcacaataagagcgaaccagcctgggagtgggaggatgcgcaggggttttctgcacttctacactcaggtaaatgcgaatgtaaggaacagacattaggaaatgccaaggcattctgtggaatgaaatattcatatgtgctaaaaataaagattttatcagctcatgataaaggtactcatgttgaggtcaatgtgaagattaaaaaggtcttaaaatctaccaaactgaagattttccgaggaaagcgaacattatatccagaatcatggacggacagaggatgcacttgtccaatcctcaatcctggtttggaataccttgtagcaggacatgaggatataagaacaggcaaactaattgtgaatatgaaaagctttgtccagcactggaaaccttctcttggaagaaaagtcatggatattttaaaaagagagtgcaagtag

SEQ ID NO: 78 - protein, 628 aa, Homo sapiens
MGSCARLLLLWGCTVVAAGLSGVAGVSSRCEKACNPRMGNLALGRKLWADTTCGQNATELYCFYSENKDLTCRQPKCDKCNAAYPHLAHLPSAMADSSFRFPRTWWQSAEDVHREKIQLDLEAEFYFTHLIVMFKSPRPAAMVLDRSQDFGKTWKPYKYFATNCSATFGLEDDVVKKGAICTSKYSSPFPCTGGEVIFKALSPPHDTENPYSAKVQEQLKITNLRVQLLKRQSCPCQRNDLNEEPQHFTHYAIYDFIVKGSCFCNGHADQCIPVHGFRPVKAPGTFHMVHGKCMCKHNTAGSHCQHCAPLYNDRPWEAADGKTGAPNECRTRKCNGHADTCHFDVNVWEASGSRSGGVCDDCQHNTEGQYCQRCKPGFYRDLRRPFSAPDACKPCSCHPVGSAVLPANSVTFCDPSNGDCPCKPGVAGRRCDRCMVGYWGFGDYGCRPCDCAGSCDPITGDCISSHTDIDWYHEVPDFRPVHNKSEPAWEWEDAQGFSALLHSGKCECKEQTLGNAKAFCGMKYSYVLKIKILSAHDKGTHVEVNVKIKKVLKSTKLKIFRGKRTLYPESWTDRGCTCPILNPGLEYLVAGHEDIRTGKLIVNMKSFVQHWKPSLGRKVMDILKRECK

SEQ ID NO: 79 - DNA, 1857 bp, Homo sapiens
  CDS (1)..(1857)
ctgagtggagtagctggagtgagttcccgctgtgaaaaagcctgcaaccctcggatgggaaatttggctttggggcgaaaactctgggcagacaccacctgcggtcagaatgctaccgaactgtactgcttctacagtgagaacacggatctgacttgtcggcagcccaaatgtgacaagtgcaatgctgcctatcctcacctggctcacctgccatctgccatggcagactcatccttccggtttcctcgcacatggtggcagtctgcggaggatgtgcacagagaaaagatccagttagacctggaagctgaattctacttcactcacctaattgtgatgttcaagtcccccaggccggctgccatggtgctggaccgctcccaggactttgggaaaacatggaagccttataagtactttgcgactaactgctccgctacatttggcctggaagatgatgttgtcaagaagggcgctatttgtactcctaaatactccagtccttttccatgcactggaggagaggttattttcaaagctttgtcaccaccatacgatacagagaacccttacagtgccaaagttcaggagcagctgaagatcaccaaccttcgcgtgcagctgctgaaacgacagtcttatccctgtcagagaaatgacctgaacgaagagcctcaacattttacacactatgcgatctatgatttcattgtcaagggcagctgcttctgcaatggccacgccgatcaatgcatacctgttcatggcttcagacctgtcaaggccccaggaacattccacatggtccatgggaagtgtatgtgtaagcacaacacagcaggcagccactgccagcactgtgccccgttatacaatgaccggccatgggaggcagctgatggcaaaacgggggctcccaacgagtgcagaacccgcaagtgtaatgggcatgctgatacctgtcacttcgacgttaatgtgtgggaggcatcagggagtcgtagtggtggtgtctgtgatgactgtcagcacaacacagaaggacagtattgccagaggtgcaagccaggcttctatcgtgacctgcggagacccttctcagctccagatgcttgcaaaccgtgttcctgccatccagtaggatcagctgtccttcctgccaactcagtgaccttctgcgaccccagcaatggtgactgcccttgcaagcctggggtggcagggcgacgttgtgacaggtgcatggtgggatactggggcttcggagactatggctgtcgaccatgtgactgtgcggggagctgtgaccctatcaccggagactgcatcagcagccacacagacatagactggtatcatgaagttcctgacttccgtcccgtgcacaataagagcgaaccagcctgggagtgggaggatgcgcaggggttttctgcacttctacactcaggtaaatgcgaatgtaaggaacagacattaggaaaggccaaggcattctgtggaatgaaatattcatatgtgctaaaaataaagattttatcagctcatgataaaggtactcatgttgaggtcaatgtgaagattaaaaaggtcttaaaatctaccaaactgaagattttccgaggaaagcgaacattatatccagaatcatggacggacagaggatgcacttgtccaatcctcaatcctggtttggaataccttgcagcaggacatgaggatataagaacaggcaaactaattgtgaatatgaaaagctttgtccagcactggaaaccttctcttggaagaaaagtcatggatattttaaaagagagtgcaagtggatccgagctcggtaccaagcttacgtag

SEQ ID NO: 80 - protein, 618 aa, Homo sapiens
LSGVAGVSSRCEKACNPRMGNLALGRKLWADTTCGQNATELYCFYSENTDLTCRQPKCDKCNAAYPHLAHLPSAMADSSFRFPRTWWQSAEDVHREKIQLDLEAEFYFTHLIVMFKSPRPAAMVLDRSQDFGKTWKPYKYFATNCSATFGLEDDVVKKGAICTPKYSSPFPCTGGEVIFKALSPPYDTENPYSAKVQEQLKITNLRVQLLKRQSYPCQRNDLNEEPQHFTHYAIYDFIVKGSCFCNGHADQCIPVHGFRPVKAPGTFHMVHGKCMCKHNTAGSHCQHCAPLYNDRPWEAADGKTGAPNECRTRKCNGHADTCHFDVNVWEASGSRSGGVCDDCQHNTEGQYCQRCKPGFYRDLRRPFSAPDACKPCSCHPVGSAVLPANSVTFCDPSNGDCPCKPGVAGRRCDRCMVGYWGFGDYGCRPCDCAGSCDPITGDCISSHTDIDWYHEVPDFRPVHNKSEPAWEWEDAQGFSALLHSGKCECKEQTLGKAKAFCGMKYSYVLKIKILSAHDKGTHVEVNVKIKKVLKSTKLKIFRGKRTLYPESWTDRGCTCPILNPGLEYLAAGHEDIRTGKLIVNMKSFVQHWKPSLGRKVMDILKESASGSELGTKLT

SEQ ID NO: 81 - DNA, 1827 bp, Homo sapiens
  CDS (1)..(1827)
ctgagtggagtagctggagtgagttcccgctgtgaaaaagcctgcaaccctcggatgggaaatttggctttggggcgaaaactctgggcagacaccacctgcggtcagaatgctaccgaactgtactgcttctacagtgagaacacggatctgacttgtcggcagcccaaatgtgacaagtgcaatgctgcctatcctcacctggctcacctgccatctgccatggcagactcatccttccggtttcctcgcacatggtggcagtctgcggaggatgtgcacagagaaaagatccagttagacctggaagctgaattctacttcactcacctaattgtgatgttcaagtcccccaggccggctgccatggtgctggaccgctcccaggactttgggaaaacatggaagccttataagtactttgcgactaactgctccgctacatttggcctggaagatgatgttgtcaagaagggcgctatttgtactcctaaatactccagtccttttccatgcactggaggagaggttattttcaaagctttgtcaccaccatacgatacagagaacccttacagtgccaaagttcaggagcagctgaagatcaccaaccttcgcgtgcagctgctgaaacgacagtcttatccctgtcagagaaatgacctgaacgaagagcctcaacattttacacactatgcgatctatgatttcattgtcaagggcagctgcttctgcaatggccacgccgatcaatgcatacctgttcatggcttcagacctgtcaaggccccaggaacattccacatggtccatgggaagtgtatgtgtaagcacaacacagcaggcagccactgccagcactgtgccccgttatacaatgaccggccatgggaggcagctgatggcaaaacgggggctcccaacgagtgcagagcccgcaagtgtaatgggcatgctgatacctgtcacttcgacgttaatgtgtgggaggcatcagggagtcgtagtggtggtgtctgtgatgactgtcagcacaacacagaaggacagtattgccagaggtgcaagccaggcttctatcgtgacctgcggagacccttctcagctccagatgcttgcaaaccgtgttcctgccatccagtaggatcagctgtccttcctgccaactcagtgaccttctgcgaccccagcaatggtgactgcccttgcaagcctggggtggcagggcgacgttgtgacaggtgcatggtgggatactggggcttcggagactatggctgtcgaccatgtgactgtgcggggagctgtgaccctatcaccggagactgcatcagcagccacacagacatagactggtatcatgaagttcctgacttccgtcccgtgcacaataagagcgaaccagcctgggagtgggaggatgcgcaggggttttctgcacttctacactcaggtaaatgcgaatgtaaggaacagacattaggaaaggccaaggcattctgtggaatgaaatattcatatgtgctaaaaataaagattttatcagctcatgataaaggtactcatgttgaggtcaatgtgaagattaaaaaggtcttaaaatctaccaaactgaagattttccgaggaaagcgaacattatatccagaatcatggacggacagaggatgcacttgtccaatcctcaatcctggtttggaataccttgcagcaggacatgaggatataagaacaggcaaactaattgtgaatatgaaaagctttgtccagcactggaaaccttctcttggaagaaaagtcatggatattttaaaagagagtgcaagt

SEQ ID NO: 82 - protein, 609 aa, Homo sapiens
LSGVAGVSSRCEKACNPRMGNLALGRKLWADTTCGQNATELYCFYSENTDLTCRQPKCDKCNAAYPHLAHLPSAMADSSFRFPRTWWQSAEDVHREKIQLDLEAEFYFTHLIVMFKSPRPAAMVLDRSQDFGKTWKPYKYFATNCSATFGLEDDVVKKGAICTPKYSSPFPCTGGEVIFKALSPPYDTENPYSAKVQEQLKITNLRVQLLKRQSYPCQRNDLNEEPQHFTHYAIYDFIVKGSCFCNGHADQCIPVHGFRPVKAPGTFHMVHGKCMCKHNTAGSHCQHCAPLYNDRPWEAADGKTGAPNECRARKCNGHADTCHFDVNVWEASGSRSGGVCDDCQHNTEGQYCQRCKPGFYRDLRRPFSAPDACKPCSCHPVGSAVLPANSVTFCDPSNGDCPCKPGVAGRRCDRCMVGYWGFGDYGCRPCDCAGSCDPITGDCISSHTDIDWYHEVPDFRPVHNKSEPAWEWEDAQGFSALLHSGKCECKEQTLGKAKAFCGMKYSYVLKIKILSAHDKGTHVEVNVKIKKVLKSTKLKIFRGKRTLYPESWTDRGCTCPILNPGLEYLAAGHEDIRTGKLIVNMKSFVQHWKPSLGRKVMDILKESAS

SEQ ID NO: 83 - DNA, 1827 bp, Homo sapiens
  CDS (1)..(1827)
ctgagtggagtagctggagtgagttcccgctgtgaaaaagcctgcaaccctcggatgggaaatttggctttggggcgaaaactctgggcagacaccacctgcggtcagaatgctaccgaactgtactgcttctacagtgagaacacggatctgacttgtcggcagcccaaatgtgacaagtgcaatgctgcctatcctcacctggctcacctgccatctgccatggcagactcatccttccggtttcctcgcacatggtggcagtctgcggaggatgtgcacagagaaaagatccagttagacctggaagctgaattctacttcactcacctaattgtgatgttcaagtcccccaggccggctgccatggtgctggaccgctcccaggactttgggaaaacatggaagccttataagtactttgcgactaactgctccgctacatttggcctggaagatgatgttgtcaagaagggcgctatttgtactcctaaatactccagtccttttccatgcactggaggagaggttattttcaaagctttgtcaccaccatacgatacagagaacccttacagtgccaaagttcaggagcagctgaagatcaccaaccttcgcgtgcagctgctgaaacgacagtcttatccctgtcagagaaatgacctgaacgaagagcctcaacattttacacactatgcgatctatgatttcattgtcaagggcagctgcttctgcaatggccacgccgatcaatgcatacctgttcatggcttcagacctgtcaaggccccaggaacattccacatggtccatgggaagtgtatgtgtaagcacaacacagcaggcagccactgccagcactgtgccccgttatacaatgaccggccatgggaggcagctgatggcaaaacgggggctcccaacgagtgcagaacctgcaagtgtaatgggcatgctgatacctgtcacttcgacgttaatgtgtgggaggcatcagggagtcgtagtggtggtgtctgtgatgactgtcagcacaacacagaaggacagtattgccagaggtgcaagccaggcttctatcgtgacctgcggagacccttctcagctccagatgcttgcaaaccgtgttcctgccatccagtaggatcagctgtccttcctgccaactcagtgaccttctgcgaccccagcaatggtgactgcccttgcaagcctggggtggcagggcgacgttgtgacaggtgcatggtgggatactggggcttcggagactatggctgtcgaccatgtgactgtgcggggagctgtgaccctatcaccggagactgcatcagcagccacacagacatagactggtatcatgaagttcctgacttccgtcccgtgcacaataagagcgaaccagcctgggagtgggaggatgcgcaggggttttctgcacttctacactcaggtaaatgcgaatgtaaggaacagacattaggaaaggccaaggcattctgtggaatgaaatattcatatgtgctaaaaataaagattttatcagctcatgataaaggtactcatgttgaggtcaatgtgaagattaaaaaggtcttaaaatctaccaaactgaagattttccgaggaaagcgaacattatatccagaatcatggacggacagaggatgcacttgtccaatcctcaatcctggtttggaataccttgcagcaggacatgaggatataagaacaggcaaactaattgtgaatatgaaaagctttgtccagcactggaaaccttctcttggaagaaaagtcatggatattttaaaagagagtgcaagt

SEQ ID NO: 84 - protein, 609 aa, Homo sapiens
LSGVAGVSSRCEKACNPRMGNLALGRKLWADTTCGQNATELYCFYSENTDLTCRQPKCDKCNAAYPHLAHLPSAMADSSFRFPRTWWQSAEDVHREKIQLDLEAEFYFTHLIVMFKSPRPAAMVLDRSQDFGKTWKPYKYFATNCSATFGLEDDVVKKGAICTPKYSSPFPCTGGEVIFKALSPPYDTENPYSAKVQEQLKITNLRVQLLKRQSYPCQRNDLNEEPQHFTHYAIYDFIVKGSCFCNGHADQCIPVHGFRPVKAPGTFHMVHGKCMCKHNTAGSHCQHCAPLYNDRPWEAADGKTGAPNECRTCKCNGHADTCHFDVNVWEASGSRSGGVCDDCQHNTEGQYCQRCKPGFYRDLRRPFSAPDACKPCSCHPVGSAVLPANSVTFCDPSNGDCPCKPGVAGRRCDRCMVGYWGFGDYGCRPCDCAGSCDPITGDCISSHTDIDWYHEVPDFRPVHNKSEPAWEWEDAQGFSALLHSGKCECKEQTLGKAKAFCGMKYSYVLKIKILSAHDKGTHVEVNVKIKKVLKSTKLKIFRGKRTLYPESWTDRGCTCPILNPGLEYLAAGHEDIRTGKLIVNMKSFVQHWKPSLGRKVMDILKESAS

SEQ ID NO: 85 - DNA, 1827 bp, Homo sapiens
  CDS (1)..(1827)
ctgagtggagtagctggagtgagttcccgctgtgaaaaagcctgcaaccctcggatgggaaatttggctttggggcgaaaactctgggcagacaccacctgcggtcagaatgctaccgaactgtactgcttctacagtgagaacacggatctgacttgtcggcagcccaaatgtgacaagtgcaatgctgcctatcctcacctggctcacctgccatctgccatggcagactcatccttccggtttcctcgcacatggtggcagtctgcggaggatgtgcacagagaaaagatccagttagacctggaagctgaattctacttcactcacctaattgtgatgttcaagtcccccaggccggctgccatggtgctggaccgctcccaggactttgggaaaacatggaagccttataagtactttgcgactaactgctccgctacatttggcctggaagatgatgttgtcaagaagggcgctatttgtactcctaaatactccagtccttttccatgcactggaggagaggttattttcaaagctttgtcaccaccatacgatacagagaacccttacagtgccaaagttcaggagcagctgaagatcaccaaccttcgcgtgcagctgctgaaacgacagtcttatccctgtcagagaaatgacctgaacgaagagcctcaacattttacacactatgcgatctatgatttcattgtcaagggcagctgcttctgcaatggccacgccgatcaatgcatacctgttcatggcttcagacctgtcaaggccccaggaacattccacatggtccatgggaagtgtatgtgtaagcacaacacagcaggcagccactgccagcactgtgccccgttatacaatgaccggccatgggaggcagctgatggcaaaacgggggctcccaacgagtgcagaacccgcaagtgtaatgggcatgctgatacctgtcacttcgacgttaatgtgtgggaggcatcagggaatcgtagtggtggtgtctgtgatgactgtcagcacaacacagaaggacagtattgccagaggtgcaagccaggcttctatcgtgacctgcggagacccttctcagctccagatgcttgcaaaccgtgttcctgccatccagtaggatcagctgtccttcctgccaactcagtgaccttctgcgaccccagcaatggtgactgcccttgcaagcctggggtggcagggcgacgttgtgacaggtgcatggtgggatactggggcttcggagactatggctgtcgaccatgtgactgtgcggggagctgtgaccctatcaccggagactgcatcagcagccacacagacatagactggtatcatgaagttcctgacttccgtcccgtgcacaataagagcgaaccagcctgggagtgggaggatgcgcaggggttttctgcacttctacactcaggtaaatgcgaatgtaaggaacagacattaggaaaggccaaggcattctgtggaatgaaatattcatatgtgctaaaaataaagattttatcagctcatgataaaggtactcatgttgaggtcaatgtgaagattaaaaaggtcttaaaatctaccaaactgaagattttccgaggaaagcgaacattatatccagaatcatggacggacagaggatgcacttgtccaatcctcaatcctggtttggaataccttgcagcaggacatgaggatataagaacaggcaaactaattgtgaatatgaaaagctttgtccagcactggaaaccttctcttggaagaaaagtcatggatattttaaaagagagtgcaagt

SEQ ID NO: 86 - protein, 609 aa, Homo sapiens
LSGVAGVSSRCEKACNPRMGNLALGRKLWADTTCGQNATELYCFYSENTDLTCRQPKCDKCNAAYPHLAHLPSAMADSSFRFPRTWWQSAEDVHREKIQLDLEAEFYFTHLIVMFKSPRPAAMVLDRSQDFGKTWKPYKYFATNCSATFGLEDDVVKKGAICTPKYSSPFPCTGGEVIFKALSPPYDTENPYSAKVQEQLKITNLRVQLLKRQSYPCQRNDLNEEPQHFTHYAIYDFIVKGSCFCNGHADQCIPVHGFRPVKAPGTFHMVHGKCMCKHNTAGSHCQHCAPLYNDRPWEAADGKTGAPNECRTRKCNGHADTCHFDVNVWEASGNRSGGVCDDCQHNTEGQYCQRCKPGFYRDLRRPFSAPDACKPCSCHPVGSAVLPANSVTFCDPSNGDCPCKPGVAGRRCDRCMVGYWGFGDYGCRPCDCAGSCDPITGDCISSHTDIDWYHEVPDFRPVHNKSEPAWEWEDAQGFSALLHSGKCECKEQTLGKAKAFCGMKYSYVLKIKILSAHDKGTHVEVNVKIKKVLKSTKLKIFRGKRTLYPESWTDRGCTCPILNPGLEYLAAGHEDIRTGKLIVNMKSFVQHWKPSLGRKVMDILKESAS

SEQ ID NO: 87 - DNA, 1827 bp, Homo sapiens
  CDS (1)..(1827)
ctgagtggagtagctggagtgagttcccgctgtgaaaaagcctgcaaccctcggatgggaaatttggctttggggcgaaaactctgggcagacaccacctgcggtcagaatgctaccgaactgtactgcttctacagtgagaacacggatctgacttgtcggcagcccaaatgtgacaagtgcaatgctgcctatcctcacctggctcacctgccatctgccatggcagactcatccttccggtttcctcgcacatggtggcagtctgcggaggatgtgcacagagaaaagatccagttagacctggaagctgaattctacttcactcacctaattgtgatgttcaagtcccccaggccggctgccatggtgctggaccgctcccaggactttgggaaaacatggaagccttataagtactttgcgactaactgctccgctacatttggcctggaagatgatgttgtcaagaagggcgctatttgtactcctaaatactccagtccttttccatgcactggaggagaggttattttcaaagctttgtcaccaccatacgatacagagaacccttacagtgccaaagttcaggagcagctgaagatcaccaaccttcgcgtgcagctgctgaaacgacagtcttatccctgtcagagaaatgacctgaacgaagagcctcaacattttacacactatgcgatctatgatttcattgtcaagggcagctgcttctgcaatggccacgccgatcaatgcatacctgttcatggcttcagacctgtcaaggccccaggaacattccacatggtccatgggaagtgtatgtgtaagcacaacacagcaggcagccactgccagcactgtgccccgttatacaatgaccggccatgggaggcagctgatggcaaaacgggggctcccaacgagtgcagaacccgcaagtgtaatgggcatgctgatacctgtcacttcgacgttaatgtgtgggaggcatcagggagtcgtagtggtggtgtctgtgatgactgtcagcacaacacagaaggacagtattgccagaggtgcaagccaggcttctatcgtgacctgcggagacccttctcagctccagatgcttgcaaaccgtgttcctgccatccagtaggatcagctgtccttcctgccaactcagtgaccttctgcgaccccagcaatggtgactgcccttgcaagcctggggtggcagggcgacgttgtgacaggtgcatggtgggatactggggcttcggagactatggctgtcgaccatgtgactgtgcggggagctgtgaccctatcaccggagactgcatcagcagccacacagacatagactggtgtcatgaagttcctgacttccgtcccgtgcacaataagagcgaaccagcctgggagtgggaggatgcgcaggggttttctgcacttctacactcaggtaaatgcgaatgtaaggaacagacattaggaaaggccaaggcattctgtggaatgaaatattcatatgtgctaaaaataaagattttatcagctcatgataaaggtactcatgttgaggtcaatgtgaagattaaaaaggtcttaaaatctaccaaactgaagattttccgaggaaagcgaacattatatccagaatcatggacggacagaggatgcacttgtccaatcctcaatcctggtttggaataccttgcagcaggacatgaggatataagaacaggcaaactaattgtgaatatgaaaagctttgtccagcactggaaaccttctcttggaagaaaagtcatggatattttaaaagagagtgcaagt

SEQ ID NO: 88 - protein, 609 aa, Homo sapiens
LSGVAGVSSRCEKACNPRMGNLALGRKLWADTTCGQNATELYCFYSENTDLTCRQPKCDKCNAAYPHLAHLPSAMADSSFRFPRTWWQSAEDVHREKIQLDLEAEFYFTHLIVMFKSPRPAAMVLDRSQDFGKTWKPYKYFATNCSATFGLEDDVVKKGAICTPKYSSPFPCTGGEVIFKALSPPYDTENPYSAKVQEQLKITNLRVQLLKRQSYPCQRNDLNEEPQHFTHYAIYDFIVKGSCFCNGHADQCIPVHGFRPVKAPGTFHMVHGKCMCKHNTAGSHCQHCAPLYNDRPWEAADGKTGAPNECRTRKCNGHADTCHFDVNVWEASGSRSGGVCDDCQHNTEGQYCQRCKPGFYRDLRRPFSAPDACKPCSCHPVGSAVLPANSVTFCDPSNGDCPCKPGVAGRRCDRCMVGYWGFGDYGCRPCDCAGSCDPITGDCISSHTDIDWCHEVPDFRPVHNKSEPAWEWEDAQGFSALLHSGKCECKEQTLGKAKAFCGMKYSYVLKIKILSAHDKGTHVEVNVKIKKVLKSTKLKIFRGKRTLYPESWTDRGCTCPILNPGLEYLAAGHEDIRTGKLIVNMKSFVQHWKPSLGRKVMDILKESAS

SEQ ID NO: 89 - DNA, 1827 bp, Homo sapiens
  CDS (1)..(1827)
ctgagtggagtagctggagtgagttcccgctgtgaaaaagcctgcaaccctcggatgggaaatttggctttggggcgaaaactctgggcagacaccacctgcggtcagaatgctaccgaactgtactgcttctacagtgagaacacggatctgacttgtcggcagcccaaatgtgacaagtgcaatgctgcctatcctcacctggctcacctgccatctgccatggcagactcatccttccggtttcctcgcacatggtggcagtctgcggaggatgtgcacagagaaaagatccagttagacctggaagctgaattctacttcactcacctaattgtgatgttcaagtcccccaggccggctgccatggtgctggaccgctcccaggactttgggaaaacatggaagccttataagtactttgcgactaactgctccgctacatttggcctggaagatgatgttgtcaagaagggcgctatttgtactcctaaatactccagtccttttccatgcactggaggagaggttattttcaaagctttgtcaccaccatacgatacagagaacccttacagtgccaaagttcaggagcagctgaagatcaccaaccttcgcgtgcagctgctgaaacgacagtcttatccctgtcagagaaatgacctgaacgaagagcctcaacattttacacactatgcgatctatgatttcattgtcaagggcagctgcttctgcaatggccacgccgatcaatgcatacctgttcatggcttcagacctgtcaaggccccaggaacattccacatggtccatgggaagtgtatgtgtaagcacaacacagcaggcagccactgccagcactgtgccccgttatacaatgaccggccatgggaggcagctgatggcaaaacgggggctcccaacgagtgcagagcctgcaagtgtaatgggcatgctgatacctgtcacttcgacgttaatgtgtgggaggcatcagggagtcgtagtggtggtgtctgtgatgactgtcagcacaacacagaaggacagtattgccagaggtgcaagccaggcttctatcgtgacctgcggagacccttctcagctccagatgcttgcaaaccgtgttcctgccatccagtaggatcagctgtccttcctgccaactcagtgaccttctgcgaccccagcaatggtgactgcccttgcaagcctggggtggcagggcgacgttgtgacaggtgcatggtgggatactggggcttcggagactatggctgtcgaccatgtgactgtgcggggagctgtgaccctatcaccggagactgcatcagcagccacacagacatagactggtatcatgaagttcctgacttccgtcccgtgcacaataagagcgaaccagcctgggagtgggaggatgcgcaggggttttctgcacttctacactcaggtaaatgcgaatgtaaggaacagacattaggaaaggccaaggcattctgtggaatgaaatattcatatgtgctaaaaataaagattttatcagctcatgataaaggtactcatgttgaggtcaatgtgaagattaaaaaggtcttaaaatctaccaaactgaagattttccgaggaaagcgaacattatatccagaatcatggacggacagaggatgcacttgtccaatcctcaatcctggtttggaataccttgcagcaggacatgaggatataagaacaggcaaactaattgtgaatatgaaaagctttgtccagcactggaaaccttctcttggaagaaaagtcatggatattttaaaagagagtgcaagt

SEQ ID NO: 90 - protein, 609 aa, Homo sapiens
LSGVAGVSSRCEKACNPRMGNLALGRKLWADTTCGQNATELYCFYSENTDLTCRQPKCDKCNAAYPHLAHLPSAMADSSFRFPRTWWQSAEDVHREKIQLDLEAEFYFTHLIVMFKSPRPAAMVLDRSQDFGKTWKPYKYFATNCSATFGLEDDVVKKGAICTPKYSSPFPCTGGEVIFKALSPPYDTENPYSAKVQEQLKITNLRVQLLKRQSYPCQRNDLNEEPQHFTHYAIYDFIVKGSCFCNGHADQCIPVHGFRPVKAPGTFHMVHGKCMCKHNTAGSHCQHCAPLYNDRPWEAADGKTGAPNECRACKCNGHADTCHFDVNVWEASGSRSGGVCDDCQHNTEGQYCQRCKPGFYRDLRRPFSAPDACKPCSCHPVGSAVLPANSVTFCDPSNGDCPCKPGVAGRRCDRCMVGYWGFGDYGCRPCDCAGSCDPITGDCISSHTDIDWYHEVPDFRPVHNKSEPAWEWEDAQGFSALLHSGKCECKEQTLGKAKAFCGMKYSYVLKIKILSAHDKGTHVEVNVKIKKVLKSTKLKIFRGKRTLYPESWTDRGCTCPILNPGLEYLAAGHEDIRTGKLIVNMKSFVQHWKPSLGRKVMDILKESAS

SEQ ID NO: 91 - DNA, 1827 bp, Homo sapiens
  CDS (1)..(1827)
ctgagtggagtagctggagtgagttcccgctgtgaaaaagcctgcaaccctcggatgggaaatttggctttggggcgaaaactctgggcagacaccacctgcggtcagaatgctaccgaactgtactgcttctacagtgagaacacggatctgacttgtcggcagcccaaatgtgacaagtgcaatgctgcctatcctcacctggctcacctgccatctgccatggcagactcatccttccggtttcctcgcacatggtggcagtctgcggaggatgtgcacagagaaaagatccagttagacctggaagctgaattctacttcactcacctaattgtgatgttcaagtcccccaggccggctgccatggtgctggaccgctcccaggactttgggaaaacatggaagccttataagtactttgcgactaactgctccgctacatttggcctggaagatgatgttgtcaagaagggcgctatttgtactcctaaatactccagtccttttccatgcactggaggagaggttattttcaaagctttgtcaccaccatacgatacagagaacccttacagtgccaaagttcaggagcagctgaagatcaccaaccttcgcgtgcagctgctgaaacgacagtcttatccctgtcagagaaatgacctgaacgaagagcctcaacattttacacactatgcgatctatgatttcattgtcaagggcagctgcttctgcaatggccacgccgatcaatgcatacctgttcatggcttcagacctgtcaaggccccaggaacattccacatggtccatgggaagtgtatgtgtaagcacaacacagcaggcagccactgccagcactgtgccccgttatacaatgaccggccatgggaggcagctgatggcaaaacgggggctcccaacgagtgcagagcccgcaagtgtaatgggcatgctgatacctgtcacttcgacgttaatgtgtgggaggcatcagggaatcgtagtggtggtgtctgtgatgactgtcagcacaacacagaaggacagtattgccagaggtgcaagccaggcttctatcgtgacctgcggagacccttctcagctccagatgcttgcaaaccgtgttcctgccatccagtaggatcagctgtccttcctgccaactcagtgaccttctgcgaccccagcaatggtgactgcccttgcaagcctggggtggcagggcgacgttgtgacaggtgcatggtgggatactggggcttcggagactatggctgtcgaccatgtgactgtgcggggagctgtgaccctatcaccggagactgcatcagcagccacacagacatagactggtatcatgaagttcctgacttccgtcccgtgcacaataagagcgaaccagcctgggagtgggaggatgcgcaggggttttctgcacttctacactcaggtaaatgcgaatgtaaggaacagacattaggaaaggccaaggcattctgtggaatgaaatattcatatgtgctaaaaataaagattttatcagctcatgataaaggtactcatgttgaggtcaatgtgaagattaaaaaggtcttaaaatctaccaaactgaagattttccgaggaaagcgaacattatatccagaatcatggacggacagaggatgcacttgtccaatcctcaatcctggtttggaataccttgcagcaggacatgaggatataagaacaggcaaactaattgtgaatatgaaaagctttgtccagcactggaaaccttctcttggaagaaaagtcatggatattttaaaagagagtgcaagt

SEQ ID NO: 92 - protein, 609 aa, Homo sapiens
LSGVAGVSSRCEKACNPRMGNLALGRKLWADTTCGQNATELYCFYSENTDLTCRQPKCDKCNAAYPHLAHLPSAMADSSFRFPRTWWQSAEDVHREKIQLDLEAEFYFTHLIVMFKSPRPAAMVLDRSQDFGKTWKPYKYFATNCSATFGLEDDVVKKGAICTPKYSSPFPCTGGEVIFKALSPPYDTENPYSAKVQEQLKITNLRVQLLKRQSYPCQRNDLNEEPQHFTHYAIYDFIVKGSCFCNGHADQCIPVHGFRPVKAPGTFHMVHGKCMCKHNTAGSHCQHCAPLYNDRPWEAADGKTGAPNECRARKCNGHADTCHFDVNVWEASGNRSGGVCDDCQHNTEGQYCQRCKPGFYRDLRRPFSAPDACKPCSCHPVGSAVLPANSVTFCDPSNGDCPCKPGVAGRRCDRCMVGYWGFGDYGCRPCDCAGSCDPITGDCISSHTDIDWYHEVPDFRPVHNKSEPAWEWEDAQGFSALLHSGKCECKEQTLGKAKAFCGMKYSYVLKIKILSAHDKGTHVEVNVKIKKVLKSTKLKIFRGKRTLYPESWTDRGCTCPILNPGLEYLAAGHEDIRTGKLIVNMKSFVQHWKPSLGRKVMDILKESAS

SEQ ID NO: 93 - DNA, 1827 bp, Homo sapiens
  CDS (1)..(1827)
ctgagtggagtagctggagtgagttcccgctgtgaaaaagcctgcaaccctcggatgggaaatttggctttggggcgaaaactctgggcagacaccacctgcggtcagaatgctaccgaactgtactgcttctacagtgagaacacggatctgacttgtcggcagcccaaatgtgacaagtgcaatgctgcctatcctcacctggctcacctgccatctgccatggcagactcatccttccggtttcctcgcacatggtggcagtctgcggaggatgtgcacagagaaaagatccagttagacctggaagctgaattctacttcactcacctaattgtgatgttcaagtcccccaggccggctgccatggtgctggaccgctcccaggactttgggaaaacatggaagccttataagtactttgcgactaactgctccgctacatttggcctggaagatgatgttgtcaagaagggcgctatttgtactcctaaatactccagtccttttccatgcactggaggagaggttattttcaaagctttgtcaccaccatacgatacagagaacccttacagtgccaaagttcaggagcagctgaagatcaccaaccttcgcgtgcagctgctgaaacgacagtcttatccctgtcagagaaatgacctgaacgaagagcctcaacattttacacactatgcgatctatgatttcattgtcaagggcagctgcttctgcaatggccacgccgatcaatgcatacctgttcatggcttcagacctgtcaaggccccaggaacattccacatggtccatgggaagtgtatgtgtaagcacaacacagcaggcagccactgccagcactgtgccccgttatacaatgaccggccatgggaggcagctgatggcaaaacgggggctcccaacgagtgcagagcccgcaagtgtaatgggcatgctgatacctgtcacttcgacgttaatgtgtgggaggcatcagggagtcgtagtggtggtgtctgtgatgactgtcagcacaacacagaaggacagtattgccagaggtgcaagccaggcttctatcgtgacctgcggagacccttctcagctccagatgcttgcaaaccgtgttcctgccatccagtaggatcagctgtccttcctgccaactcagtgaccttctgcgaccccagcaatggtgactgcccttgcaagcctggggtggcagggcgacgttgtgacaggtgcatggtgggatactggggcttcggagactatggctgtcgaccatgtgactgtgcggggagctgtgaccctatcaccggagactgcatcagcagccacacagacatagactggtgtcatgaagttcctgacttccgtcccgtgcacaataagagcgaaccagcctgggagtgggaggatgcgcaggggttttctgcacttctacactcaggtaaatgcgaatgtaaggaacagacattaggaaaggccaaggcattctgtggaatgaaatattcatatgtgctaaaaataaagattttatcagctcatgataaaggtactcatgttgaggtcaatgtgaagattaaaaaggtcttaaaatctaccaaactgaagattttccgaggaaagcgaacattatatccagaatcatggacggacagaggatgcacttgtccaatcctcaatcctggtttggaataccttgcagcaggacatgaggatataagaacaggcaaactaattgtgaatatgaaaagctttgtccagcactggaaaccttctcttggaagaaaagtcatggatattttaaaagagagtgcaagt

SEQ ID NO: 94 - protein, 609 aa, Homo sapiens
LSGVAGVSSRCEKACNPRMGNLALGRKLWADTTCGQNATELYCFYSENTDLTCRQPKCDKCNAAYPHLAHLPSAMADSSFRFPRTWWQSAEDVHREKIQLDLEAEFYFTHLIVMFKSPRPAAMVLDRSQDFGKTWKPYKYFATNCSATFGLEDDVVKKGAICTPKYSSPFPCTGGEVIFKALSPPYDTENPYSAKVQEQLKITNLRVQLLKRQSYPCQRNDLNEEPQHFTHYAIYDFIVKGSCFCNGHADQCIPVHGFRPVKAPGTFHMVHGKCMCKHNTAGSHCQHCAPLYNDRPWEAADGKTGAPNECRARKCNGHADTCHFDVNVWEASGSRSGGVCDDCQHNTEGQYCQRCKPGFYRDLRRPFSAPDACKPCSCHPVGSAVLPANSVTFCDPSNGDCPCKPGVAGRRCDRCMVGYWGFGDYGCRPCDCAGSCDPITGDCISSHTDIDWCHEVPDFRPVHNKSEPAWEWEDAQGFSALLHSGKCECKEQTLGKAKAFCGMKYSYVLKIKILSAHDKGTHVEVNVKIKKVLKSTKLKIFRGKRTLYPESWTDRGCTCPILNPGLEYLAAGHEDIRTGKLIVNMKSFVQHWKPSLGRKVMDILKESAS

SEQ ID NO: 95 - DNA, 1827 bp, Homo sapiens
  CDS (1)..(1827)
ctgagtggagtagctggagtgagttcccgctgtgaaaaagcctgcaaccctcggatgggaaatttggctttggggcgaaaactctgggcagacaccacctgcggtcagaatgctaccgaactgtactgcttctacagtgagaacacggatctgacttgtcggcagcccaaatgtgacaagtgcaatgctgcctatcctcacctggctcacctgccatctgccatggcagactcatccttccggtttcctcgcacatggtggcagtctgcggaggatgtgcacagagaaaagatccagttagacctggaagctgaattctacttcactcacctaattgtgatgttcaagtcccccaggccggctgccatggtgctggaccgctcccaggactttgggaaaacatggaagccttataagtactttgcgactaactgctccgctacatttggcctggaagatgatgttgtcaagaagggcgctatttgtactcctaaatactccagtccttttccatgcactggaggagaggttattttcaaagctttgtcaccaccatacgatacagagaacccttacagtgccaaagttcaggagcagctgaagatcaccaaccttcgcgtgcagctgctgaaacgacagtcttatccctgtcagagaaatgacctgaacgaagagcctcaacattttacacactatgcgatctatgatttcattgtcaagggcagctgcttctgcaatggccacgccgatcaatgcatacctgttcatggcttcagacctgtcaaggccccaggaacattccacatggtccatgggaagtgtatgtgtaagcacaacacagcaggcagccactgccagcactgtgccccgttatacaatgaccggccatgggaggcagctgatggcaaaacgggggctcccaacgagtgcagaacctgcaagtgtaatgggcatgctgatacctgtcacttcgacgttaatgtgtgggaggcatcagggaatcgtagtggtggtgtctgtgatgactgtcagcacaacacagaaggacagtattgccagaggtgcaagccaggcttctatcgtgacctgcggagacccttctcagctccagatgcttgcaaaccgtgttcctgccatccagtaggatcagctgtccttcctgccaactcagtgaccttctgcgaccccagcaatggtgactgcccttgcaagcctggggtggcagggcgacgttgtgacaggtgcatggtgggatactggggcttcggagactatggctgtcgaccatgtgactgtgcggggagctgtgaccctatcaccggagactgcatcagcagccacacagacatagactggtatcatgaagttcctgacttccgtcccgtgcacaataagagcgaaccagcctgggagtgggaggatgcgcaggggttttctgcacttctacactcaggtaaatgcgaatgtaaggaacagacattaggaaaggccaaggcattctgtggaatgaaatattcatatgtgctaaaaataaagattttatcagctcatgataaaggtactcatgttgaggtcaatgtgaagattaaaaaggtcttaaaatctaccaaactgaagattttccgaggaaagcgaacattatatccagaatcatggacggacagaggatgcacttgtccaatcctcaatcctggtttggaataccttgcagcaggacatgaggatataagaacaggcaaactaattgtgaatatgaaaagctttgtccagcactggaaaccttctcttggaagaaaagtcatggatattttaaaagagagtgcaagt

SEQ ID NO: 96 - protein, 609 aa, Homo sapiens
LSGVAGVSSRCEKACNPRMGNLALGRKLWADTTCGQNATELYCFYSENTDLTCRQPKCDKCNAAYPHLAHLPSAMADSSFRFPRTWWQSAEDVHREKIQLDLEAEFYFTHLIVMFKSPRPAAMVLDRSQDFGKTWKPYKYFATNCSATFGLEDDVVKKGAICTPKYSSPFPCTGGEVIFKALSPPYDTENPYSAKVQEQLKITNLRVQLLKRQSYPCQRNDLNEEPQHFTHYAIYDFIVKGSCFCNGHADQCIPVHGFRPVKAPGTFHMVHGKCMCKHNTAGSHCQHCAPLYNDRPWEAADGKTGAPNECRTCKCNGHADTCHFDVNVWEASGNRSGGVCDDCQHNTEGQYCQRCKPGFYRDLRRPFSAPDACKPCSCHPVGSAVLPANSVTFCDPSNGDCPCKPGVAGRRCDRCMVGYWGFGDYGCRPCDCAGSCDPITGDCISSHTDIDWYHEVPDFRPVHNKSEPAWEWEDAQGFSALLHSGKCECKEQTLGKAKAFCGMKYSYVLKIKILSAHDKGTHVEVNVKIKKVLKSTKLKIFRGKRTLYPESWTDRGCTCPILNPGLEYLAAGHEDIRTGKLIVNMKSFVQHWKPSLGRKVMDILKESAS

SEQ ID NO: 97 - DNA, 1827 bp, Homo sapiens
  CDS (1)..(1827)
ctgagtggagtagctggagtgagttcccgctgtgaaaaagcctgcaaccctcggatgggaaatttggctttggggcgaaaactctgggcagacaccacctgcggtcagaatgctaccgaactgtactgcttctacagtgagaacacggatctgacttgtcggcagcccaaatgtgacaagtgcaatgctgcctatcctcacctggctcacctgccatctgccatggcagactcatccttccggtttcctcgcacatggtggcagtctgcggaggatgtgcacagagaaaagatccagttagacctggaagctgaattctacttcactcacctaattgtgatgttcaagtcccccaggccggctgccatggtgctggaccgctcccaggactttgggaaaacatggaagccttataagtactttgcgactaactgctccgctacatttggcctggaagatgatgttgtcaagaagggcgctatttgtactcctaaatactccagtccttttccatgcactggaggagaggttattttcaaagctttgtcaccaccatacgatacagagaacccttacagtgccaaagttcaggagcagctgaagatcaccaaccttcgcgtgcagctgctgaaacgacagtcttatccctgtcagagaaatgacctgaacgaagagcctcaacattttacacactatgcgatctatgatttcattgtcaagggcagctgcttctgcaatggccacgccgatcaatgcatacctgttcatggcttcagacctgtcaaggccccaggaacattccacatggtccatgggaagtgtatgtgtaagcacaacacagcaggcagccactgccagcactgtgccccgttatacaatgaccggccatgggaggcagctgatggcaaaacgggggctcccaacgagtgcagaacctgcaagtgtaatgggcatgctgatacctgtcacttcgacgttaatgtgtgggaggcatcagggagtcgtagtggtggtgtctgtgatgactgtcagcacaacacagaaggacagtattgccagaggtgcaagccaggcttctatcgtgacctgcggagacccttctcagctccagatgcttgcaaaccgtgttcctgccatccagtaggatcagctgtccttcctgccaactcagtgaccttctgcgaccccagcaatggtgactgcccttgcaagcctggggtggcagggcgacgttgtgacaggtgcatggtgggatactggggcttcggagactatggctgtcgaccatgtgactgtgcggggagctgtgaccctatcaccggagactgcatcagcagccacacagacatagactggtgtcatgaagttcctgacttccgtcccgtgcacaataagagcgaaccagcctgggagtgggaggatgcgcaggggttttctgcacttctacactcaggtaaatgcgaatgtaaggaacagacattaggaaaggccaaggcattctgtggaatgaaatattcatatgtgctaaaaataaagattttatcagctcatgataaaggtactcatgttgaggtcaatgtgaagattaaaaaggtcttaaaatctaccaaactgaagattttccgaggaaagcgaacattatatccagaatcatggacggacagaggatgcacttgtccaatcctcaatcctggtttggaataccttgcagcaggacatgaggatataagaacaggcaaactaattgtgaatatgaaaagctttgtccagcactggaaaccttctcttggaagaaaagtcatggatattttaaaagagagtgcaagt

SEQ ID NO: 98 - protein, 609 aa, Homo sapiens
LSGVAGVSSRCEKACNPRMGNLALGRKLWADTTCGQNATELYCFYSENTDLTCRQPKCDKCNAAYPHLAHLPSAMADSSFRFPRTWWQSAEDVHREKIQLDLEAEFYFTHLIVMFKSPRPAAMVLDRSQDFGKTWKPYKYFATNCSATFGLEDDVVKKGAICTPKYSSPFPCTGGEVIFKALSPPYDTENPYSAKVQEQLKITNLRVQLLKRQSYPCQRNDLNEEPQHFTHYAIYDFIVKGSCFCNGHADQCIPVHGFRPVKAPGTFHMVHGKCMCKHNTAGSHCQHCAPLYNDRPWEAADGKTGAPNECRTCKCNGHADTCHFDVNVWEASGSRSGGVCDDCQHNTEGQYCQRCKPGFYRDLRRPFSAPDACKPCSCHPVGSAVLPANSVTFCDPSNGDCPCKPGVAGRRCDRCMVGYWGFGDYGCRPCDCAGSCDPITGDCISSHTDIDWCHEVPDFRPVHNKSEPAWEWEDAQGFSALLHSGKCECKEQTLGKAKAFCGMKYSYVLKIKILSAHDKGTHVEVNVKIKKVLKSTKLKIFRGKRTLYPESWTDRGCTCPILNPGLEYLAAGHEDIRTGKLIVNMKSFVQHWKPSLGRKVMDILKESAS

SEQ ID NO: 99 - DNA, 1827 bp, Homo sapiens
  CDS (1)..(1827)
ctgagtggagtagctggagtgagttcccgctgtgaaaaagcctgcaaccctcggatgggaaatttggctttggggcgaaaactctgggcagacaccacctgcggtcagaatgctaccgaactgtactgcttctacagtgagaacacggatctgacttgtcggcagcccaaatgtgacaagtgcaatgctgcctatcctcacctggctcacctgccatctgccatggcagactcatccttccggtttcctcgcacatggtggcagtctgcggaggatgtgcacagagaaaagatccagttagacctggaagctgaattctacttcactcacctaattgtgatgttcaagtcccccaggccggctgccatggtgctggaccgctcccaggactttgggaaaacatggaagccttataagtactttgcgactaactgctccgctacatttggcctggaagatgatgttgtcaagaagggcgctatttgtactcctaaatactccagtccttttccatgcactggaggagaggttattttcaaagctttgtcaccaccatacgatacagagaacccttacagtgccaaagttcaggagcagctgaagatcaccaaccttcgcgtgcagctgctgaaacgacagtcttatccctgtcagagaaatgacctgaacgaagagcctcaacattttacacactatgcgatctatgatttcattgtcaagggcagctgcttctgcaatggccacgccgatcaatgcatacctgttcatggcttcagacctgtcaaggccccaggaacattccacatggtccatgggaagtgtatgtgtaagcacaacacagcaggcagccactgccagcactgtgccccgttatacaatgaccggccatgggaggcagctgatggcaaaacgggggctcccaacgagtgcagaacccgcaagtgtaatgggcatgctgatacctgtcacttcgacgttaatgtgtgggaggcatcagggaatcgtagtggtggtgtctgtgatgactgtcagcacaacacagaaggacagtattgccagaggtgcaagccaggcttctatcgtgacctgcggagacccttctcagctccagatgcttgcaaaccgtgttcctgccatccagtaggatcagctgtccttcctgccaactcagtgaccttctgcgaccccagcaatggtgactgcccttgcaagcctggggtggcagggcgacgttgtgacaggtgcatggtgggatactggggcttcggagactatggctgtcgaccatgtgactgtgcggggagctgtgaccctatcaccggagactgcatcagcagccacacagacatagactggtgtcatgaagttcctgacttccgtcccgtgcacaataagagcgaaccagcctgggagtgggaggatgcgcaggggttttctgcacttctacactcaggtaaatgcgaatgtaaggaacagacattaggaaaggccaaggcattctgtggaatgaaatattcatatgtgctaaaaataaagattttatcagctcatgataaaggtactcatgttgaggtcaatgtgaagattaaaaaggtcttaaaatctaccaaactgaagattttccgaggaaagcgaacattatatccagaatcatggacggacagaggatgcacttgtccaatcctcaatcctggtttggaataccttgcagcaggacatgaggatataagaacaggcaaactaattgtgaatatgaaaagctttgtccagcactggaaaccttctcttggaagaaaagtcatggatattttaaaagagagtgcaagt

SEQ ID NO: 100 - protein, 609 aa, Homo sapiens
LSGVAGVSSRCEKACNPRMGNLALGRKLWADTTCGQNATELYCFYSENTDLTCRQPKCDKCNAAYPHLAHLPSAMADSSFRFPRTWWQSAEDVHREKIQLDLEAEFYFTHLIVMFKSPRPAAMVLDRSQDFGKTWKPYKYFATNCSATFGLEDDVVKKGAICTPKYSSPFPCTGGEVIFKALSPPYDTENPYSAKVQEQLKITNLRVQLLKRQSYPCQRNDLNEEPQHFTHYAIYDFIVKGSCFCNGHADQCIPVHGFRPVKAPGTFHMVHGKCMCKHNTAGSHCQHCAPLYNDRPWEAADGKTGAPNECRTRKCNGHADTCHFDVNVWEASGNRSGGVCDDCQHNTEGQYCQRCKPGFYRDLRRPFSAPDACKPCSCHPVGSAVLPANSVTFCDPSNGDCPCKPGVAGRRCDRCMVGYWGFGDYGCRPCDCAGSCDPITGDCISSHTDIDWCHEVPDFRPVHNKSEPAWEWEDAQGFSALLHSGKCECKEQTLGKAKAFCGMKYSYVLKIKILSAHDKGTHVEVNVKIKKVLKSTKLKIFRGKRTLYPESWTDRGCTCPILNPGLEYLAAGHEDIRTGKLIVNMKSFVQHWKPSLGRKVMDILKESAS

SEQ ID NO: 101 - DNA, 1827 bp, Homo sapiens
  CDS (1)..(1827)
ctgagtggagtagctggagtgagttcccgctgtgaaaaagcctgcaaccctcggatgggaaatttggctttggggcgaaaactctgggcagacaccacctgcggtcagaatgctaccgaactgtactgcttctacagtgagaacacggatctgacttgtcggcagcccaaatgtgacaagtgcaatgctgcctatcctcacctggctcacctgccatctgccatggcagactcatccttccggtttcctcgcacatggtggcagtctgcggaggatgtgcacagagaaaagatccagttagacctggaagctgaattctacttcactcacctaattgtgatgttcaagtcccccaggccggctgccatggtgctggaccgctcccaggactttgggaaaacatggaagccttataagtactttgcgactaactgctccgctacatttggcctggaagatgatgttgtcaagaagggcgctatttgtactcctaaatactccagtccttttccatgcactggaggagaggttattttcaaagctttgtcaccaccatacgatacagagaacccttacagtgccaaagttcaggagcagctgaagatcaccaaccttcgcgtgcagctgctgaaacgacagtcttatccctgtcagagaaatgacctgaacgaagagcctcaacattttacacactatgcgatctatgatttcattgtcaagggcagctgcttctgcaatggccacgccgatcaatgcatacctgttcatggcttcagacctgtcaaggccccaggaacattccacatggtccatgggaagtgtatgtgtaagcacaacacagcaggcagccactgccagcactgtgccccgttatacaatgaccggccatgggaggcagctgatggcaaaacgggggctcccaacgagtgcagagcctgcaagtgtaatgggcatgctgatacctgtcacttcgacgttaatgtgtgggaggcatcagggaatcgtagtggtggtgtctgtgatgactgtcagcacaacacagaaggacagtattgccagaggtgcaagccaggcttctatcgtgacctgcggagacccttctcagctccagatgcttgcaaaccgtgttcctgccatccagtaggatcagctgtccttcctgccaactcagtgaccttctgcgaccccagcaatggtgactgcccttgcaagcctggggtggcagggcgacgttgtgacaggtgcatggtgggatactggggcttcggagactatggctgtcgaccatgtgactgtgcggggagctgtgaccctatcaccggagactgcatcagcagccacacagacatagactggtatcatgaagttcctgacttccgtcccgtgcacaataagagcgaaccagcctgggagtgggaggatgcgcaggggttttctgcacttctacactcaggtaaatgcgaatgtaaggaacagacattaggaaaggccaaggcattctgtggaatgaaatattcatatgtgctaaaaataaagattttatcagctcatgataaaggtactcatgttgaggtcaatgtgaagattaaaaaggtcttaaaatctaccaaactgaagattttccgaggaaagcgaacattatatccagaatcatggacggacagaggatgcacttgtccaatcctcaatcctggtttggaataccttgcagcaggacatgaggatataagaacaggcaaactaattgtgaatatgaaaagctttgtccagcactggaaaccttctcttggaagaaaagtcatggatattttaaaagagagtgcaagt

SEQ ID NO: 102 - protein, 609 aa, Homo sapiens
LSGVAGVSSRCEKACNPRMGNLALGRKLWADTTCGQNATELYCFYSENTDLTCRQPKCDKCNAAYPHLAHLPSAMADSSFRFPRTWWQSAEDVHREKIQLDLEAEFYFTHLIVMFKSPRPAAMVLDRSQDFGKTWKPYKYFATNCSATFGLEDDVVKKGAICTPKYSSPFPCTGGEVIFKALSPPYDTENPYSAKVQEQLKITNLRVQLLKRQSYPCQRNDLNEEPQHFTHYAIYDFIVKGSCFCNGHADQCIPVHGFRPVKAPGTFHMVHGKCMCKHNTAGSHCQHCAPLYNDRPWEAADGKTGAPNECRACKCNGHADTCHFDVNVWEASGNRSGGVCDDCQHNTEGQYCQRCKPGFYRDLRRPFSAPDACKPCSCHPVGSAVLPANSVTFCDPSNGDCPCKPGVAGRRCDRCMVGYWGFGDYGCRPCDCAGSCDPITGDCISSHTDIDWYHEVPDFRPVHNKSEPAWEWEDAQGFSALLHSGKCECKEQTLGKAKAFCGMKYSYVLKIKILSAHDKGTHVEVNVKIKKVLKSTKLKIFRGKRTLYPESWTDRGCTCPILNPGLEYLAAGHEDIRTGKLIVNMKSFVQHWKPSLGRKVMDILKESAS

SEQ ID NO: 103 - DNA, 1827 bp, Homo sapiens
  CDS (1)..(1827)
ctgagtggagtagctggagtgagttcccgctgtgaaaaagcctgcaaccctcggatgggaaatttggctttggggcgaaaactctgggcagacaccacctgcggtcagaatgctaccgaactgtactgcttctacagtgagaacacggatctgacttgtcggcagcccaaatgtgacaagtgcaatgctgcctatcctcacctggctcacctgccatctgccatggcagactcatccttccggtttcctcgcacatggtggcagtctgcggaggatgtgcacagagaaaagatccagttagacctggaagctgaattctacttcactcacctaattgtgatgttcaagtcccccaggccggctgccatggtgctggaccgctcccaggactttgggaaaacatggaagccttataagtactttgcgactaactgctccgctacatttggcctggaagatgatgttgtcaagaagggcgctatttgtactcctaaatactccagtccttttccatgcactggaggagaggttattttcaaagctttgtcaccaccatacgatacagagaacccttacagtgccaaagttcaggagcagctgaagatcaccaaccttcgcgtgcagctgctgaaacgacagtcttatccctgtcagagaaatgacctgaacgaagagcctcaacattttacacactatgcgatctatgatttcattgtcaagggcagctgcttctgcaatggccacgccgatcaatgcatacctgttcatggcttcagacctgtcaaggccccaggaacattccacatggtccatgggaagtgtatgtgtaagcacaacacagcaggcagccactgccagcactgtgccccgttatacaatgaccggccatgggaggcagctgatggcaaaacgggggctcccaacgagtgcagagcctgcaagtgtaatgggcatgctgatacctgtcacttcgacgttaatgtgtgggaggcatcagggagtcgtagtggtggtgtctgtgatgactgtcagcacaacacagaaggacagtattgccagaggtgcaagccaggcttctatcgtgacctgcggagacccttctcagctccagatgcttgcaaaccgtgttcctgccatccagtaggatcagctgtccttcctgccaactcagtgaccttctgcgaccccagcaatggtgactgcccttgcaagcctggggtggcagggcgacgttgtgacaggtgcatggtgggatactggggcttcggagactatggctgtcgaccatgtgactgtgcggggagctgtgaccctatcaccggagactgcatcagcagccacacagacatagactggtgtcatgaagttcctgacttccgtcccgtgcacaataagagcgaaccagcctgggagtgggaggatgcgcaggggttttctgcacttctacactcaggtaaatgcgaatgtaaggaacagacattaggaaaggccaaggcattctgtggaatgaaatattcatatgtgctaaaaataaagattttatcagctcatgataaaggtactcatgttgaggtcaatgtgaagattaaaaaggtcttaaaatctaccaaactgaagattttccgaggaaagcgaacattatatccagaatcatggacggacagaggatgcacttgtccaatcctcaatcctggtttggaataccttgcagcaggacatgaggatataagaacaggcaaactaattgtgaatatgaaaagctttgtccagcactggaaaccttctcttggaagaaaagtcatggatattttaaaagagagtgcaagt

SEQ ID NO: 104 - protein, 609 aa, Homo sapiens
LSGVAGVSSRCEKACNPRMGNLALGRKLWADTTCGQNATELYCFYSENTDLTCRQPKCDKCNAAYPHLAHLPSAMADSSFRFPRTWWQSAEDVHREKIQLDLEAEFYFTHLIVMFKSPRPAAMVLDRSQDFGKTWKPYKYFATNCSATFGLEDDVVKKGAICTPKYSSPFPCTGGEVIFKALSPPYDTENPYSAKVQEQLKITNLRVQLLKRQSYPCQRNDLNEEPQHFTHYAIYDFIVKGSCFCNGHADQCIPVHGFRPVKAPGTFHMVHGKCMCKHNTAGSHCQHCAPLYNDRPWEAADGKTGAPNECRACKCNGHADTCHFDVNVWEASGSRSGGVCDDCQHNTEGQYCQRCKPGFYRDLRRPFSAPDACKPCSCHPVGSAVLPANSVTFCDPSNGDCPCKPGVAGRRCDRCMVGYWGFGDYGCRPCDCAGSCDPITGDCISSHTDIDWCHEVPDFRPVHNKSEPAWEWEDAQGFSALLHSGKCECKEQTLGKAKAFCGMKYSYVLKIKILSAHDKGTHVEVNVKIKKVLKSTKLKIFRGKRTLYPESWTDRGCTCPILNPGLEYLAAGHEDIRTGKLIVNMKSFVQHWKPSLGRKVMDILKESAS

SEQ ID NO: 105 - DNA, 1827 bp, Homo sapiens
  CDS (1)..(1827)
ctgagtggagtagctggagtgagttcccgctgtgaaaaagcctgcaaccctcggatgggaaatttggctttggggcgaaaactctgggcagacaccacctgcggtcagaatgctaccgaactgtactgcttctacagtgagaacacggatctgacttgtcggcagcccaaatgtgacaagtgcaatgctgcctatcctcacctggctcacctgccatctgccatggcagactcatccttccggtttcctcgcacatggtggcagtctgcggaggatgtgcacagagaaaagatccagttagacctggaagctgaattctacttcactcacctaattgtgatgttcaagtcccccaggccggctgccatggtgctggaccgctcccaggactttgggaaaacatggaagccttataagtactttgcgactaactgctccgctacatttggcctggaagatgatgttgtcaagaagggcgctatttgtactcctaaatactccagtccttttccatgcactggaggagaggttattttcaaagctttgtcaccaccatacgatacagagaacccttacagtgccaaagttcaggagcagctgaagatcaccaaccttcgcgtgcagctgctgaaacgacagtcttatccctgtcagagaaatgacctgaacgaagagcctcaacattttacacactatgcgatctatgatttcattgtcaagggcagctgcttctgcaatggccacgccgatcaatgcatacctgttcatggcttcagacctgtcaaggccccaggaacattccacatggtccatgggaagtgtatgtgtaagcacaacacagcaggcagccactgccagcactgtgccccgttatacaatgaccggccatgggaggcagctgatggcaaaacgggggctcccaacgagtgcagagcccgcaagtgtaatgggcatgctgatacctgtcacttcgacgttaatgtgtgggaggcatcagggaatcgtagtggtggtgtctgtgatgactgtcagcacaacacagaaggacagtattgccagaggtgcaagccaggcttctatcgtgacctgcggagacccttctcagctccagatgcttgcaaaccgtgttcctgccatccagtaggatcagctgtccttcctgccaactcagtgaccttctgcgaccccagcaatggtgactgcccttgcaagcctggggtggcagggcgacgttgtgacaggtgcatggtgggatactggggcttcggagactatggctgtcgaccatgtgactgtgcggggagctgtgaccctatcaccggagactgcatcagcagccacacagacatagactggtgtcatgaagttcctgacttccgtcccgtgcacaataagagcgaaccagcctgggagtgggaggatgcgcaggggttttctgcacttctacactcaggtaaatgcgaatgtaaggaacagacattaggaaaggccaaggcattctgtggaatgaaatattcatatgtgctaaaaataaagattttatcagctcatgataaaggtactcatgttgaggtcaatgtgaagattaaaaaggtcttaaaatctaccaaactgaagattttccgaggaaagcgaacattatatccagaatcatggacggacagaggatgcacttgtccaatcctcaatcctggtttggaataccttgcagcaggacatgaggatataagaacaggcaaactaattgtgaatatgaaaagctttgtccagcactggaaaccttctcttggaagaaaagtcatggatattttaaaagagagtgcaagt

SEQ ID NO: 106 - protein, 609 aa, Homo sapiens
LSGVAGVSSRCEKACNPRMGNLALGRKLWADTTCGQNATELYCFYSENTDLTCRQPKCDKCNAAYPHLAHLPSAMADSSFRFPRTWWQSAEDVHREKIQLDLEAEFYFTHLIVMFKSPRPAAMVLDRSQDFGKTWKPYKYFATNCSATFGLEDDVVKKGAICTPKYSSPFPCTGGEVIFKALSPPYDTENPYSAKVQEQLKITNLRVQLLKRQSYPCQRNDLNEEPQHFTHYAIYDFIVKGSCFCNGHADQCIPVHGFRPVKAPGTFHMVHGKCMCKHNTAGSHCQHCAPLYNDRPWEAADGKTGAPNECRARKCNGHADTCHFDVNVWEASGNRSGGVCDDCQHNTEGQYCQRCKPGFYRDLRRPFSAPDACKPCSCHPVGSAVLPANSVTFCDPSNGDCPCKPGVAGRRCDRCMVGYWGFGDYGCRPCDCAGSCDPITGDCISSHTDIDWCHEVPDFRPVHNKSEPAWEWEDAQGFSALLHSGKCECKEQTLGKAKAFCGMKYSYVLKIKILSAHDKGTHVEVNVKIKKVLKSTKLKIFRGKRTLYPESWTDRGCTCPILNPGLEYLAAGHEDIRTGKLIVNMKSFVQHWKPSLGRKVMDILKESAS

SEQ ID NO: 107 - DNA, 1827 bp, Homo sapiens
  CDS (1)..(1827)
ctgagtggagtagctggagtgagttcccgctgtgaaaaagcctgcaaccctcggatgggaaatttggctttggggcgaaaactctgggcagacaccacctgcggtcagaatgctaccgaactgtactgcttctacagtgagaacacggatctgacttgtcggcagcccaaatgtgacaagtgcaatgctgcctatcctcacctggctcacctgccatctgccatggcagactcatccttccggtttcctcgcacatggtggcagtctgcggaggatgtgcacagagaaaagatccagttagacctggaagctgaattctacttcactcacctaattgtgatgttcaagtcccccaggccggctgccatggtgctggaccgctcccaggactttgggaaaacatggaagccttataagtactttgcgactaactgctccgctacatttggcctggaagatgatgttgtcaagaagggcgctatttgtactcctaaatactccagtccttttccatgcactggaggagaggttattttcaaagctttgtcaccaccatacgatacagagaacccttacagtgccaaagttcaggagcagctgaagatcaccaaccttcgcgtgcagctgctgaaacgacagtcttatccctgtcagagaaatgacctgaacgaagagcctcaacattttacacactatgcgatctatgatttcattgtcaagggcagctgcttctgcaatggccacgccgatcaatgcatacctgttcatggcttcagacctgtcaaggccccaggaacattccacatggtccatgggaagtgtatgtgtaagcacaacacagcaggcagccactgccagcactgtgccccgttatacaatgaccggccatgggaggcagctgatggcaaaacgggggctcccaacgagtgcagaacctgcaagtgtaatgggcatgctgatacctgtcacttcgacgttaatgtgtgggaggcatcagggaatcgtagtggtggtgtctgtgatgactgtcagcacaacacagaaggacagtattgccagaggtgcaagccaggcttctatcgtgacctgcggagacccttctcagctccagatgcttgcaaaccgtgttcctgccatccagtaggatcagctgtccttcctgccaactcagtgaccttctgcgaccccagcaatggtgactgcccttgcaagcctggggtggcagggcgacgttgtgacaggtgcatggtgggatactggggcttcggagactatggctgtcgaccatgtgactgtgcggggagctgtgaccctatcaccggagactgcatcagcagccacacagacatagactggtgtcatgaagttcctgacttccgtcccgtgcacaataagagcgaaccagcctgggagtgggaggatgcgcaggggttttctgcacttctacactcaggtaaatgcgaatgtaaggaacagacattaggaaaggccaaggcattctgtggaatgaaatattcatatgtgctaaaaataaagattttatcagctcatgataaaggtactcatgttgaggtcaatgtgaagattaaaaaggtcttaaaatctaccaaactgaagattttccgaggaaagcgaacattatatccagaatcatggacggacagaggatgcacttgtccaatcctcaatcctggtttggaataccttgcagcaggacatgaggatataagaacaggcaaactaattgtgaatatgaaaagctttgtccagcactggaaaccttctcttggaagaaaagtcatggatattttaaaagagagtgcaagt

SEQ ID NO: 108 - protein, 609 aa, Homo sapiens
LSGVAGVSSRCEKACNPRMGNLALGRKLWADTTCGQNATELYCFYSENTDLTCRQPKCDKCNAAYPHLAHLPSAMADSSFRFPRTWWQSAEDVHREKIQLDLEAEFYFTHLIVMFKSPRPAAMVLDRSQDFGKTWKPYKYFATNCSATFGLEDDVVKKGAICTPKYSSPFPCTGGEVIFKALSPPYDTENPYSAKVQEQLKITNLRVQLLKRQSYPCQRNDLNEEPQHFTHYAIYDFIVKGSCFCNGHADQCIPVHGFRPVKAPGTFHMVHGKCMCKHNTAGSHCQHCAPLYNDRPWEAADGKTGAPNECRTCKCNGHADTCHFDVNVWEASGNRSGGVCDDCQHNTEGQYCQRCKPGFYRDLRRPFSAPDACKPCSCHPVGSAVLPANSVTFCDPSNGDCPCKPGVAGRRCDRCMVGYWGFGDYGCRPCDCAGSCDPITGDCISSHTDIDWCHEVPDFRPVHNKSEPAWEWEDAQGFSALLHSGKCECKEQTLGKAKAFCGMKYSYVLKIKILSAHDKGTHVEVNVKIKKVLKSTKLKIFRGKRTLYPESWTDRGCTCPILNPGLEYLAAGHEDIRTGKLIVNMKSFVQHWKPSLGRKVMDILKESAS

SEQ ID NO: 109 - DNA, 1827 bp, Homo sapiens
  CDS (1)..(1827)
ctgagtggagtagctggagtgagttcccgctgtgaaaaagcctgcaaccctcggatgggaaatttggctttggggcgaaaactctgggcagacaccacctgcggtcagaatgctaccgaactgtactgcttctacagtgagaacacggatctgacttgtcggcagcccaaatgtgacaagtgcaatgctgcctatcctcacctggctcacctgccatctgccatggcagactcatccttccggtttcctcgcacatggtggcagtctgcggaggatgtgcacagagaaaagatccagttagacctggaagctgaattctacttcactcacctaattgtgatgttcaagtcccccaggccggctgccatggtgctggaccgctcccaggactttgggaaaacatggaagccttataagtactttgcgactaactgctccgctacatttggcctggaagatgatgttgtcaagaagggcgctatttgtactcctaaatactccagtccttttccatgcactggaggagaggttattttcaaagctttgtcaccaccatacgatacagagaacccttacagtgccaaagttcaggagcagctgaagatcaccaaccttcgcgtgcagctgctgaaacgacagtcttatccctgtcagagaaatgacctgaacgaagagcctcaacattttacacactatgcgatctatgatttcattgtcaagggcagctgcttctgcaatggccacgccgatcaatgcatacctgttcatggcttcagacctgtcaaggccccaggaacattccacatggtccatgggaagtgtatgtgtaagcacaacacagcaggcagccactgccagcactgtgccccgttatacaatgaccggccatgggaggcagctgatggcaaaacgggggctcccaacgagtgcagagcctgcaagtgtaatgggcatgctgatacctgtcacttcgacgttaatgtgtgggaggcatcagggaatcgtagtggtggtgtctgtgatgactgtcagcacaacacagaaggacagtattgccagaggtgcaagccaggcttctatcgtgacctgcggagacccttctcagctccagatgcttgcaaaccgtgttcctgccatccagtaggatcagctgtccttcctgccaactcagtgaccttctgcgaccccagcaatggtgactgcccttgcaagcctggggtggcagggcgacgttgtgacaggtgcatggtgggatactggggcttcggagactatggctgtcgaccatgtgactgtgcggggagctgtgaccctatcaccggagactgcatcagcagccacacagacatagactggtgtcatgaagttcctgacttccgtcccgtgcacaataagagcgaaccagcctgggagtgggaggatgcgcaggggttttctgcacttctacactcaggtaaatgcgaatgtaaggaacagacattaggaaaggccaaggcattctgtggaatgaaatattcatatgtgctaaaaataaagattttatcagctcatgataaaggtactcatgttgaggtcaatgtgaagattaaaaaggtcttaaaatctaccaaactgaagattttccgaggaaagcgaacattatatccagaatcatggacggacagaggatgcacttgtccaatcctcaatcctggtttggaataccttgcagcaggacatgaggatataagaacaggcaaactaattgtgaatatgaaaagctttgtccagcactggaaaccttctcttggaagaaaagtcatggatattttaaaagagagtgcaagt

SEQ ID NO: 110 - protein, 609 aa, Homo sapiens
LSGVAGVSSRCEKACNPRMGNLALGRKLWADTTCGQNATELYCFYSENTDLTCRQPKCDKCNAAYPHLAHLPSAMADSSFRFPRTWWQSAEDVHREKIQLDLEAEFYFTHLIVMFKSPRPAAMVLDRSQDFGKTWKPYKYFATNCSATFGLEDDVVKKGAICTPKYSSPFPCTGGEVIFKALSPPYDTENPYSAKVQEQLKITNLRVQLLKRQSYPCQRNDLNEEPQHFTHYAIYDFIVKGSCFCNGHADQCIPVHGFRPVKAPGTFHMVHGKCMCKHNTAGSHCQHCAPLYNDRPWEAADGKTGAPNECRACKCNGHADTCHFDVNVWEASGNRSGGVCDDCQHNTEGQYCQRCKPGFYRDLRRPFSAPDACKPCSCHPVGSAVLPANSVTFCDPSNGDCPCKPGVAGRRCDRCMVGYWGFGDYGCRPCDCAGSCDPITGDCISSHTDIDWCHEVPDFRPVHNKSEPAWEWEDAQGFSALLHSGKCECKEQTLGKAKAFCGMKYSYVLKIKILSAHDKGTHVEVNVKIKKVLKSTKLKIFRGKRTLYPESWTDRGCTCPILNPGLEYLAAGHEDIRTGKLIVNMKSFVQHWKPSLGRKVMDILKESAS

SEQ ID NO: 111 - DNA, 1830 bp, Homo sapiens
  CDS (1)..(1830)
ctgagtggagtagctggagtgagttcccgctgtgaaaaagcctgcaaccctcggatgggaaatttggctttggggcgaaaactctgggcagacaccacctgcggtcagaatgctaccgaactgtactgcttctacagtgagaacaaggatctgacttgtcggcagcccaaatgtgacaagtgcaatgctgcctatcctcacctggctcacctgccatctgccatggcagactcatccttccggtttcctcgcacatggtggcagtctgcggaggatgtgcacagagaaaagatccagttagacctggaagctgaattctacttcactcacctaattgtgatgttcaagtcccccaggccggctgccatggtgctggaccgctcccaggactttgggaaaacatggaagccttataagtactttgcgactaactgctccgctacatttggcctggaagatgatgttgtcaagaagggcgctatttgtacttctaaatactccagtccttttccatgcactggaggagaggttattttcaaagctttgtcaccaccacacgatacagagaacccttacagtgccaaagttcaggagcagctgaagatcaccaaccttcgcgtgcagctgctgaaacgacagtcttgtccctgtcagagaaatgacctgaacgaagagcctcaacattttacacactatgcgatctatgatttcattgtcaagggcagctgcttctgcaatggccacgccgatcaatgcatacctgttcatggcttcagacctgtcaaggccccaggaacattccacatggtccatgggaagtgtatgtgtaagcacaacacagcaggcagccactgccagcactgtgccccgttatacaatgaccggccatgggaggcagctgatggcaaaacgggggctcccaacgagtgcagaacctgcaagtgtaatgggcatgctgatacctgtcacttcgacgttaatgtgtgggaggcatcagggaatcgtagtggtggtgtctgtgatgactgtcagcacaacacagaaggacagtattgccagaggtgcaagccaggcttctatcgtgacctgcggagacccttctcagctccagatgcttgcaaaccgtgttcctgccatccagtaggatcagctgtccttcctgccaactcagtgaccttctgcgaccccagcaatggtgactgcccttgcaagcctggggtggcagggcgacgttgtgacaggtgcatggtgggatactggggcttcggagactatggctgtcgaccatgtgactgtgcggggagctgtgaccctatcaccggagactgcatcagcagccacacagacatagactggtgtcatgaagttcctgacttccgtcccgtgcacaataagagcgaaccagcctgggagtgggaggatgcgcaggggttttctgcacttctacactcaggtaaatgcgaatgtaaggaacagacattaggaaatgccaaggcattctgtggaatgaaatattcatatgtgctaaaaataaagattttatcagctcatgataaaggtactcatgttgaggtcaatgtgaagattaaaaaggtcttaaaatctaccaaactgaagattttccgaggaaagcgaacattatatccagaatcatggacggacagaggatgcacttgtccaatcctcaatcctggtttggaataccttgtagcaggacatgaggatataagaacaggcaaactaattgtgaatatgaaaagctttgtccagcactggaaaccttctcttggaagaaaagtcatggatattttaaaaagagagtgcaagtag

SEQ ID NO: 112 - protein, 609 aa, Homo sapiens
LSGVAGVSSRCEKACNPRMGNLALGRKLWADTTCGQNATELYCFYSENKDLTCRQPKCDKCNAAYPHLAHLPSAMADSSFRFPRTWWQSAEDVHREKIQLDLEAEFYFTHLIVMFKSPRPAAMVLDRSQDFGKTWKPYKYFATNCSATFGLEDDVVKKGAICTSKYSSPFPCTGGEVIFKALSPPHDTENPYSAKVQEQLKITNLRVQLLKRQSCPCQRNDLNEEPQHFTHYAIYDFIVKGSCFCNGHADQCIPVHGFRPVKAPGTFHMVHGKCMCKHNTAGSHCQHCAPLYNDRPWEAADGKTGAPNECRTCKCNGHADTCHFDVNVWEASGNRSGGVCDDCQHNTEGQYCQRCKPGFYRDLRRPFSAPDACKPCSCHPVGSAVLPANSVTFCDPSNGDCPCKPGVAGRRCDRCMVGYWGFGDYGCRPCDCAGSCDPITGDCISSHTDIDWCHEVPDFRPVHNKSEPAWEWEDAQGFSALLHSGKCECKEQTLGNAKAFCGMKYSYVLKIKILSAHDKGTHVEVNVKIKKVLKSTKLKIFRGKRTLYPESWTDRGCTCPILNPGLEYLVAGHEDIRTGKLIVNMKSFVQHWKPSLGRKVMDILKRECK

SEQ ID NO: 113 - DNA, 1830 bp, Homo sapiens
  CDS (1)..(1830)
ctgagtggagtagctggagtgagttcccgctgtgaaaaagcctgcaaccctcggatgggaaatttggctttggggcgaaaactctgggcagacaccacctgcggtcagaatgctaccgaactgtactgcttctacagtgagaacaaggatctgacttgtcggcagcccaaatgtgacaagtgcaatgctgcctatcctcacctggctcacctgccatctgccatggcagactcatccttccggtttcctcgcacatggtggcagtctgcggaggatgtgcacagagaaaagatccagttagacctggaagctgaattctacttcactcacctaattgtgatgttcaagtcccccaggccggctgccatggtgctggaccgctcccaggactttgggaaaacatggaagccttataagtactttgcgactaactgctccgctacatttggcctggaagatgatgttgtcaagaagggcgctatttgtacttctaaatactccagtccttttccatgcactggaggagaggttattttcaaagctttgtcaccaccacacgatacagagaacccttacagtgccaaagttcaggagcagctgaagatcaccaaccttcgcgtgcagctgctgaaacgacagtcttgtccctgtcagagaaatgacctgaacgaagagcctcaacattttacacactatgcgatctatgatttcattgtcaagggcagctgcttctgcaatggccacgccgatcaatgcatacctgttcatggcttcagacctgtcaaggccccaggaacattccacatggtccatgggaagtgtatgtgtaagcacaacacagcaggcagccactgccagcactgtgccccgttatacaatgaccggccatgggaggcagctgatggcaaaacgggggctcccaacgagtgcagagcccgcaagtgtaatgggcatgctgatacctgtcacttcgacgttaatgtgtgggaggcatcagggaatcgtagtggtggtgtctgtgatgactgtcagcacaacacagaaggacagtattgccagaggtgcaagccaggcttctatcgtgacctgcggagacccttctcagctccagatgcttgcaaaccgtgttcctgccatccagtaggatcagctgtccttcctgccaactcagtgaccttctgcgaccccagcaatggtgactgcccttgcaagcctggggtggcagggcgacgttgtgacaggtgcatggtgggatactggggcttcggagactatggctgtcgaccatgtgactgtgcggggagctgtgaccctatcaccggagactgcatcagcagccacacagacatagactggtgtcatgaagttcctgacttccgtcccgtgcacaataagagcgaaccagcctgggagtgggaggatgcgcaggggttttctgcacttctacactcaggtaaatgcgaatgtaaggaacagacattaggaaatgccaaggcattctgtggaatgaaatattcatatgtgctaaaaataaagattttatcagctcatgataaaggtactcatgttgaggtcaatgtgaagattaaaaaggtcttaaaatctaccaaactgaagattttccgaggaaagcgaacattatatccagaatcatggacggacagaggatgcacttgtccaatcctcaatcctggtttggaataccttgtagcaggacatgaggatataagaacaggcaaactaattgtgaatatgaaaagctttgtccagcactggaaaccttctcttggaagaaaagtcatggatattttaaaaagagagtgcaagtag

SEQ ID NO: 114 - protein, 609 aa, Homo sapiens
LSGVAGVSSRCEKACNPRMGNLALGRKLWADTTCGQNATELYCFYSENKDLTCRQPKCDKCNAAYPHLAHLPSAMADSSFRFPRTWWQSAEDVHREKIQLDLEAEFYFTHLIVMFKSPRPAAMVLDRSQDFGKTWKPYKYFATNCSATFGLEDDVVKKGAICTSKYSSPFPCTGGEVIFKALSPPHDTENPYSAKVQEQLKITNLRVQLLKRQSCPCQRNDLNEEPQHFTHYAIYDFIVKGSCFCNGHADQCIPVHGFRPVKAPGTFHMVHGKCMCKHNTAGSHCQHCAPLYNDRPWEAADGKTGAPNECRARKCNGHADTCHFDVNVWEASGNRSGGVCDDCQHNTEGQYCQRCKPGFYRDLRRPFSAPDACKPCSCHPVGSAVLPANSVTFCDPSNGDCPCKPGVAGRRCDRCMVGYWGFGDYGCRPCDCAGSCDPITGDCISSHTDIDWCHEVPDFRPVHNKSEPAWEWEDAQGFSALLHSGKCECKEQTLGNAKAFCGMKYSYVLKIKILSAHDKGTHVEVNVKIKKVLKSTKLKIFRGKRTLYPESWTDRGCTCPILNPGLEYLVAGHEDIRTGKLIVNMKSFVQHWKPSLGRKVMDILKRECK

SEQ ID NO: 115 - DNA, 1830 bp, Homo sapiens
  CDS (1)..(1830)
ctgagtggagtagctggagtgagttcccgctgtgaaaaagcctgcaaccctcggatgggaaatttggctttggggcgaaaactctgggcagacaccacctgcggtcagaatgctaccgaactgtactgcttctacagtgagaacaaggatctgacttgtcggcagcccaaatgtgacaagtgcaatgctgcctatcctcacctggctcacctgccatctgccatggcagactcatccttccggtttcctcgcacatggtggcagtctgcggaggatgtgcacagagaaaagatccagttagacctggaagctgaattctacttcactcacctaattgtgatgttcaagtcccccaggccggctgccatggtgctggaccgctcccaggactttgggaaaacatggaagccttataagtactttgcgactaactgctccgctacatttggcctggaagatgatgttgtcaagaagggcgctatttgtacttctaaatactccagtccttttccatgcactggaggagaggttattttcaaagctttgtcaccaccacacgatacagagaacccttacagtgccaaagttcaggagcagctgaagatcaccaaccttcgcgtgcagctgctgaaacgacagtcttgtccctgtcagagaaatgacctgaacgaagagcctcaacattttacacactatgcgatctatgatttcattgtcaagggcagctgcttctgcaatggccacgccgatcaatgcatacctgttcatggcttcagacctgtcaaggccccaggaacattccacatggtccatgggaagtgtatgtgtaagcacaacacagcaggcagccactgccagcactgtgccccgttatacaatgaccggccatgggaggcagctgatggcaaaacgggggctcccaacgagtgcagagcctgcaagtgtaatgggcatgctgatacctgtcacttcgacgttaatgtgtgggaggcatcagggagtcgtagtggtggtgtctgtgatgactgtcagcacaacacagaaggacagtattgccagaggtgcaagccaggcttctatcgtgacctgcggagacccttctcagctccagatgcttgcaaaccgtgttcctgccatccagtaggatcagctgtccttcctgccaactcagtgaccttctgcgaccccagcaatggtgactgcccttgcaagcctggggtggcagggcgacgttgtgacaggtgcatggtgggatactggggcttcggagactatggctgtcgaccatgtgactgtgcggggagctgtgaccctatcaccggagactgcatcagcagccacacagacatagactggtgtcatgaagttcctgacttccgtcccgtgcacaataagagcgaaccagcctgggagtgggaggatgcgcaggggttttctgcacttctacactcaggtaaatgcgaatgtaaggaacagacattaggaaatgccaaggcattctgtggaatgaaatattcatatgtgctaaaaataaagattttatcagctcatgataaaggtactcatgttgaggtcaatgtgaagattaaaaaggtcttaaaatctaccaaactgaagattttccgaggaaagcgaacattatatccagaatcatggacggacagaggatgcacttgtccaatcctcaatcctggtttggaataccttgtagcaggacatgaggatataagaacaggcaaactaattgtgaatatgaaaagctttgtccagcactggaaaccttctcttggaagaaaagtcatggatattttaaaaagagagtgcaagtag

SEQ ID NO: 116 - protein, 609 aa, Homo sapiens
LSGVAGVSSRCEKACNPRMGNLALGRKLWADTTCGQNATELYCFYSENKDLTCRQPKCDKCNAAYPHLAHLPSAMADSSFRFPRTWWQSAEDVHREKIQLDLEAEFYFTHLIVMFKSPRPAAMVLDRSQDFGKTWKPYKYFATNCSATFGLEDDVVKKGAICTSKYSSPFPCTGGEVIFKALSPPHDTENPYSAKVQEQLKITNLRVQLLKRQSCPCQRNDLNEEPQHFTHYAIYDFIVKGSCFCNGHADQCIPVHGFRPVKAPGTFHMVHGKCMCKHNTAGSHCQHCAPLYNDRPWEAADGKTGAPNECRACKCNGHADTCHFDVNVWEASGSRSGGVCDDCQHNTEGQYCQRCKPGFYRDLRRPFSAPDACKPCSCHPVGSAVLPANSVTFCDPSNGDCPCKPGVAGRRCDRCMVGYWGFGDYGCRPCDCAGSCDPITGDCISSHTDIDWCHEVPDFRPVHNKSEPAWEWEDAQGFSALLHSGKCECKEQTLGNAKAFCGMKYSYVLKIKILSAHDKGTHVEVNVKIKKVLKSTKLKIFRGKRTLYPESWTDRGCTCPILNPGLEYLVAGHEDIRTGKLIVNMKSFVQHWKPSLGRKVMDILKRECK

SEQ ID NO: 117 - DNA, 1830 bp, Homo sapiens
  CDS (1)..(1830)
ctgagtggagtagctggagtgagttcccgctgtgaaaaagcctgcaaccctcggatgggaaatttggctttggggcgaaaactctgggcagacaccacctgcggtcagaatgctaccgaactgtactgcttctacagtgagaacaaggatctgacttgtcggcagcccaaatgtgacaagtgcaatgctgcctatcctcacctggctcacctgccatctgccatggcagactcatccttccggtttcctcgcacatggtggcagtctgcggaggatgtgcacagagaaaagatccagttagacctggaagctgaattctacttcactcacctaattgtgatgttcaagtcccccaggccggctgccatggtgctggaccgctcccaggactttgggaaaacatggaagccttataagtactttgcgactaactgctccgctacatttggcctggaagatgatgttgtcaagaagggcgctatttgtacttctaaatactccagtccttttccatgcactggaggagaggttattttcaaagctttgtcaccaccacacgatacagagaacccttacagtgccaaagttcaggagcagctgaagatcaccaaccttcgcgtgcagctgctgaaacgacagtcttgtccctgtcagagaaatgacctgaacgaagagcctcaacattttacacactatgcgatctatgatttcattgtcaagggcagctgcttctgcaatggccacgccgatcaatgcatacctgttcatggcttcagacctgtcaaggccccaggaacattccacatggtccatgggaagtgtatgtgtaagcacaacacagcaggcagccactgccagcactgtgccccgttatacaatgaccggccatgggaggcagctgatggcaaaacgggggctcccaacgagtgcagagcctgcaagtgtaatgggcatgctgatacctgtcacttcgacgttaatgtgtgggaggcatcagggaatcgtagtggtggtgtctgtgatgactgtcagcacaacacagaaggacagtattgccagaggtgcaagccaggcttctatcgtgacctgcggagacccttctcagctccagatgcttgcaaaccgtgttcctgccatccagtaggatcagctgtccttcctgccaactcagtgaccttctgcgaccccagcaatggtgactgcccttgcaagcctggggtggcagggcgacgttgtgacaggtgcatggtgggatactggggcttcggagactatggctgtcgaccatgtgactgtgcggggagctgtgaccctatcaccggagactgcatcagcagccacacagacatagactggtatcatgaagttcctgacttccgtcccgtgcacaataagagcgaaccagcctgggagtgggaggatgcgcaggggttttctgcacttctacactcaggtaaatgcgaatgtaaggaacagacattaggaaatgccaaggcattctgtggaatgaaatattcatatgtgctaaaaataaagattttatcagctcatgataaaggtactcatgttgaggtcaatgtgaagattaaaaaggtcttaaaatctaccaaactgaagattttccgaggaaagcgaacattatatccagaatcatggacggacagaggatgcacttgtccaatcctcaatcctggtttggaataccttgtagcaggacatgaggatataagaacaggcaaactaattgtgaatatgaaaagctttgtccagcactggaaaccttctcttggaagaaaagtcatggatattttaaaaagagagtgcaagtag

SEQ ID NO: 118 - protein, 609 aa, Homo sapiens
LSGVAGVSSRCEKACNPRMGNLALGRKLWADTTCGQNATELYCFYSENKDLTCRQPKCDKCNAAYPHLAHLPSAMADSSFRFPRTWWQSAEDVHREKIQLDLEAEFYFTHLIVMFKSPRPAAMVLDRSQDFGKTWKPYKYFATNCSATFGLEDDVVKKGAICTSKYSSPFPCTGGEVIFKALSPPHDTENPYSAKVQEQLKITNLRVQLLKRQSCPCQRNDLNEEPQHFTHYAIYDFIVKGSCFCNGHADQCIPVHGFRPVKAPGTFHMVHGKCMCKHNTAGSHCQHCAPLYNDRPWEAADGKTGAPNECRACKCNGHADTCHFDVNVWEASGNRSGGVCDDCQHNTEGQYCQRCKPGFYRDLRRPFSAPDACKPCSCHPVGSAVLPANSVTFCDPSNGDCPCKPGVAGRRCDRCMVGYWGFGDYGCRPCDCAGSCDPITGDCISSHTDIDWYHEVPDFRPVHNKSEPAWEWEDAQGFSALLHSGKCECKEQTLGNAKAFCGMKYSYVLKIKILSAHDKGTHVEVNVKIKKVLKSTKLKIFRGKRTLYPESWTDRGCTCPILNPGLEYLVAGHEDIRTGKLIVNMKSFVQHWKPSLGRKVMDILKRECK

SEQ ID NO: 119 - DNA, 1830 bp, Homo sapiens
  CDS (1)..(1830)
ctgagtggagtagctggagtgagttcccgctgtgaaaaagcctgcaaccctcggatgggaaatttggctttggggcgaaaactctgggcagacaccacctgcggtcagaatgctaccgaactgtactgcttctacagtgagaacaaggatctgacttgtcggcagcccaaatgtgacaagtgcaatgctgcctatcctcacctggctcacctgccatctgccatggcagactcatccttccggtttcctcgcacatggtggcagtctgcggaggatgtgcacagagaaaagatccagttagacctggaagctgaattctacttcactcacctaattgtgatgttcaagtcccccaggccggctgccatggtgctggaccgctcccaggactttgggaaaacatggaagccttataagtactttgcgactaactgctccgctacatttggcctggaagatgatgttgtcaagaagggcgctatttgtacttctaaatactccagtccttttccatgcactggaggagaggttattttcaaagctttgtcaccaccacacgatacagagaacccttacagtgccaaagttcaggagcagctgaagatcaccaaccttcgcgtgcagctgctgaaacgacagtcttgtccctgtcagagaaatgacctgaacgaagagcctcaacattttacacactatgcgatctatgatttcattgtcaagggcagctgcttctgcaatggccacgccgatcaatgcatacctgttcatggcttcagacctgtcaaggccccaggaacattccacatggtccatgggaagtgtatgtgtaagcacaacacagcaggcagccactgccagcactgtgccccgttatacaatgaccggccatgggaggcagctgatggcaaaacgggggctcccaacgagtgcagaacccgcaagtgtaatgggcatgctgatacctgtcacttcgacgttaatgtgtgggaggcatcagggaatcgtagtggtggtgtctgtgatgactgtcagcacaacacagaaggacagtattgccagaggtgcaagccaggcttctatcgtgacctgcggagacccttctcagctccagatgcttgcaaaccgtgttcctgccatccagtaggatcagctgtccttcctgccaactcagtgaccttctgcgaccccagcaatggtgactgcccttgcaagcctggggtggcagggcgacgttgtgacaggtgcatggtgggatactggggcttcggagactatggctgtcgaccatgtgactgtgcggggagctgtgaccctatcaccggagactgcatcagcagccacacagacatagactggtgtcatgaagttcctgacttccgtcccgtgcacaataagagcgaaccagcctgggagtgggaggatgcgcaggggttttctgcacttctacactcaggtaaatgcgaatgtaaggaacagacattaggaaatgccaaggcattctgtggaatgaaatattcatatgtgctaaaaataaagattttatcagctcatgataaaggtactcatgttgaggtcaatgtgaagattaaaaaggtcttaaaatctaccaaactgaagattttccgaggaaagcgaacattatatccagaatcatggacggacagaggatgcacttgtccaatcctcaatcctggtttggaataccttgtagcaggacatgaggatataagaacaggcaaactaattgtgaatatgaaaagctttgtccagcactggaaaccttctcttggaagaaaagtcatggatattttaaaaagagagtgcaagtag

SEQ ID NO: 120 - protein, 609 aa, Homo sapiens
LSGVAGVSSRCEKACNPRMGNLALGRKLWADTTCGQNATELYCFYSENKDLTCRQPKCDKCNAAYPHLAHLPSAMADSSFRFPRTWWQSAEDVHREKIQLDLEAEFYFTHLIVMFKSPRPAAMVLDRSQDFGKTWKPYKYFATNCSATFGLEDDVVKKGAICTSKYSSPFPCTGGEVIFKALSPPHDTENPYSAKVQEQLKITNLRVQLLKRQSCPCQRNDLNEEPQHFTHYAIYDFIVKGSCFCNGHADQCIPVHGFRPVKAPGTFHMVHGKCMCKHNTAGSHCQHCAPLYNDRPWEAADGKTGAPNECRTRKCNGHADTCHFDVNVWEASGNRSGGVCDDCQHNTEGQYCQRCKPGFYRDLRRPFSAPDACKPCSCHPVGSAVLPANSVTFCDPSNGDCPCKPGVAGRRCDRCMVGYWGFGDYGCRPCDCAGSCDPITGDCISSHTDIDWCHEVPDFRPVHNKSEPAWEWEDAQGFSALLHSGKCECKEQTLGNAKAFCGMKYSYVLKIKILSAHDKGTHVEVNVKIKKVLKSTKLKIFRGKRTLYPESWTDRGCTCPILNPGLEYLVAGHEDIRTGKLIVNMKSFVQHWKPSLGRKVMDILKRECK

SEQ ID NO: 121 - DNA, 1830 bp, Homo sapiens
  CDS (1)..(1830)
ctgagtggagtagctggagtgagttcccgctgtgaaaaagcctgcaaccctcggatgggaaatttggctttggggcgaaaactctgggcagacaccacctgcggtcagaatgctaccgaactgtactgcttctacagtgagaacaaggatctgacttgtcggcagcccaaatgtgacaagtgcaatgctgcctatcctcacctggctcacctgccatctgccatggcagactcatccttccggtttcctcgcacatggtggcagtctgcggaggatgtgcacagagaaaagatccagttagacctggaagctgaattctacttcactcacctaattgtgatgttcaagtcccccaggccggctgccatggtgctggaccgctcccaggactttgggaaaacatggaagccttataagtactttgcgactaactgctccgctacatttggcctggaagatgatgttgtcaagaagggcgctatttgtacttctaaatactccagtccttttccatgcactggaggagaggttattttcaaagctttgtcaccaccacacgatacagagaacccttacagtgccaaagttcaggagcagctgaagatcaccaaccttcgcgtgcagctgctgaaacgacagtcttgtccctgtcagagaaatgacctgaacgaagagcctcaacattttacacactatgcgatctatgatttcattgtcaagggcagctgcttctgcaatggccacgccgatcaatgcatacctgttcatggcttcagacctgtcaaggccccaggaacattccacatggtccatgggaagtgtatgtgtaagcacaacacagcaggcagccactgccagcactgtgccccgttatacaatgaccggccatgggaggcagctgatggcaaaacgggggctcccaacgagtgcagaacctgcaagtgtaatgggcatgctgatacctgtcacttcgacgttaatgtgtgggaggcatcagggagtcgtagtggtggtgtctgtgatgactgtcagcacaacacagaaggacagtattgccagaggtgcaagccaggcttctatcgtgacctgcggagacccttctcagctccagatgcttgcaaaccgtgttcctgccatccagtaggatcagctgtccttcctgccaactcagtgaccttctgcgaccccagcaatggtgactgcccttgcaagcctggggtggcagggcgacgttgtgacaggtgcatggtgggatactggggcttcggagactatggctgtcgaccatgtgactgtgcggggagctgtgaccctatcaccggagactgcatcagcagccacacagacatagactggtgtcatgaagttcctgacttccgtcccgtgcacaataagagcgaaccagcctgggagtgggaggatgcgcaggggttttctgcacttctacactcaggtaaatgcgaatgtaaggaacagacattaggaaatgccaaggcattctgtggaatgaaatattcatatgtgctaaaaataaagattttatcagctcatgataaaggtactcatgttgaggtcaatgtgaagattaaaaaggtcttaaaatctaccaaactgaagattttccgaggaaagcgaacattatatccagaatcatggacggacagaggatgcacttgtccaatcctcaatcctggtttggaataccttgtagcaggacatgaggatataagaacaggcaaactaattgtgaatatgaaaagctttgtccagcactggaaaccttctcttggaagaaaagtcatggatattttaaaaagagagtgcaagtag

SEQ ID NO: 122 - protein, 609 aa, Homo sapiens
LSGVAGVSSRCEKACNPRMGNLALGRKLWADTTCGQNATELYCFYSENKDLTCRQPKCDKCNAAYPHLAHLPSAMADSSFRFPRTWWQSAEDVHREKIQLDLEAEFYFTHLIVMFKSPRPAAMVLDRSQDFGKTWKPYKYFATNCSATFGLEDDVVKKGAICTSKYSSPFPCTGGEVIFKALSPPHDTENPYSAKVQEQLKITNLRVQLLKRQSCPCQRNDLNEEPQHFTHYAIYDFIVKGSCFCNGHADQCIPVHGFRPVKAPGTFHMVHGKCMCKHNTAGSHCQHCAPLYNDRPWEAADGKTGAPNECRTCKCNGHADTCHFDVNVWEASGSRSGGVCDDCQHNTEGQYCQRCKPGFYRDLRRPFSAPDACKPCSCHPVGSAVLPANSVTFCDPSNGDCPCKPGVAGRRCDRCMVGYWGFGDYGCRPCDCAGSCDPITGDCISSHTDIDWCHEVPDFRPVHNKSEPAWEWEDAQGFSALLHSGKCECKEQTLGNAKAFCGMKYSYVLKIKILSAHDKGTHVEVNVKIKKVLKSTKLKIFRGKRTLYPESWTDRGCTCPILNPGLEYLVAGHEDIRTGKLIVNMKSFVQHWKPSLGRKVMDILKRECK

SEQ ID NO: 123 - DNA, 1830 bp, Homo sapiens
  CDS (1)..(1830)
ctgagtggagtagctggagtgagttcccgctgtgaaaaagcctgcaaccctcggatgggaaatttggctttggggcgaaaactctgggcagacaccacctgcggtcagaatgctaccgaactgtactgcttctacagtgagaacaaggatctgacttgtcggcagcccaaatgtgacaagtgcaatgctgcctatcctcacctggctcacctgccatctgccatggcagactcatccttccggtttcctcgcacatggtggcagtctgcggaggatgtgcacagagaaaagatccagttagacctggaagctgaattctacttcactcacctaattgtgatgttcaagtcccccaggccggctgccatggtgctggaccgctcccaggactttgggaaaacatggaagccttataagtactttgcgactaactgctccgctacatttggcctggaagatgatgttgtcaagaagggcgctatttgtacttctaaatactccagtccttttccatgcactggaggagaggttattttcaaagctttgtcaccaccacacgatacagagaacccttacagtgccaaagttcaggagcagctgaagatcaccaaccttcgcgtgcagctgctgaaacgacagtcttgtccctgtcagagaaatgacctgaacgaagagcctcaacattttacacactatgcgatctatgatttcattgtcaagggcagctgcttctgcaatggccacgccgatcaatgcatacctgttcatggcttcagacctgtcaaggccccaggaacattccacatggtccatgggaagtgtatgtgtaagcacaacacagcaggcagccactgccagcactgtgccccgttatacaatgaccggccatgggaggcagctgatggcaaaacgggggctcccaacgagtgcagaacctgcaagtgtaatgggcatgctgatacctgtcacttcgacgttaatgtgtgggaggcatcagggaatcgtagtggtggtgtctgtgatgactgtcagcacaacacagaaggacagtattgccagaggtgcaagccaggcttctatcgtgacctgcggagacccttctcagctccagatgcttgcaaaccgtgttcctgccatccagtaggatcagctgtccttcctgccaactcagtgaccttctgcgaccccagcaatggtgactgcccttgcaagcctggggtggcagggcgacgttgtgacaggtgcatggtgggatactggggcttcggagactatggctgtcgaccatgtgactgtgcggggagctgtgaccctatcaccggagactgcatcagcagccacacagacatagactggtatcatgaagttcctgacttccgtcccgtgcacaataagagcgaaccagcctgggagtgggaggatgcgcaggggttttctgcacttctacactcaggtaaatgcgaatgtaaggaacagacattaggaaatgccaaggcattctgtggaatgaaatattcatatgtgctaaaaataaagattttatcagctcatgataaaggtactcatgttgaggtcaatgtgaagattaaaaaggtcttaaaatctaccaaactgaagattttccgaggaaagcgaacattatatccagaatcatggacggacagaggatgcacttgtccaatcctcaatcctggtttggaataccttgtagcaggacatgaggatataagaacaggcaaactaattgtgaatatgaaaagctttgtccagcactggaaaccttctcttggaagaaaagtcatggatattttaaaaagagagtgcaagtag

SEQ ID NO: 124 - protein, 609 aa, Homo sapiens
LSGVAGVSSRCEKACNPRMGNLALGRKLWADTTCGQNATELYCFYSENKDLTCRQPKCDKCNAAYPHLAHLPSAMADSSFRFPRTWWQSAEDVHREKIQLDLEAEFYFTHLIVMFKSPRPAAMVLDRSQDFGKTWKPYKYFATNCSATFGLEDDVVKKGAICTSKYSSPFPCTGGEVIFKALSPPHDTENPYSAKVQEQLKITNLRVQLLKRQSCPCQRNDLNEEPQHFTHYAIYDFIVKGSCFCNGHADQCIPVHGFRPVKAPGTFHMVHGKCMCKHNTAGSHCQHCAPLYNDRPWEAADGKTGAPNECRTCKCNGHADTCHFDVNVWEASGNRSGGVCDDCQHNTEGQYCQRCKPGFYRDLRRPFSAPDACKPCSCHPVGSAVLPANSVTFCDPSNGDCPCKPGVAGRRCDRCMVGYWGFGDYGCRPCDCAGSCDPITGDCISSHTDIDWYHEVPDFRPVHNKSEPAWEWEDAQGFSALLHSGKCECKEQTLGNAKAFCGMKYSYVLKIKILSAHDKGTHVEVNVKIKKVLKSTKLKIFRGKRTLYPESWTDRGCTCPILNPGLEYLVAGHEDIRTGKLIVNMKSFVQHWKPSLGRKVMDILKRECK

SEQ ID NO: 125 - DNA, 1830 bp, Homo sapiens
  CDS (1)..(1830)
ctgagtggagtagctggagtgagttcccgctgtgaaaaagcctgcaaccctcggatgggaaatttggctttggggcgaaaactctgggcagacaccacctgcggtcagaatgctaccgaactgtactgcttctacagtgagaacaaggatctgacttgtcggcagcccaaatgtgacaagtgcaatgctgcctatcctcacctggctcacctgccatctgccatggcagactcatccttccggtttcctcgcacatggtggcagtctgcggaggatgtgcacagagaaaagatccagttagacctggaagctgaattctacttcactcacctaattgtgatgttcaagtcccccaggccggctgccatggtgctggaccgctcccaggactttgggaaaacatggaagccttataagtactttgcgactaactgctccgctacatttggcctggaagatgatgttgtcaagaagggcgctatttgtacttctaaatactccagtccttttccatgcactggaggagaggttattttcaaagctttgtcaccaccacacgatacagagaacccttacagtgccaaagttcaggagcagctgaagatcaccaaccttcgcgtgcagctgctgaaacgacagtcttgtccctgtcagagaaatgacctgaacgaagagcctcaacattttacacactatgcgatctatgatttcattgtcaagggcagctgcttctgcaatggccacgccgatcaatgcatacctgttcatggcttcagacctgtcaaggccccaggaacattccacatggtccatgggaagtgtatgtgtaagcacaacacagcaggcagccactgccagcactgtgccccgttatacaatgaccggccatgggaggcagctgatggcaaaacgggggctcccaacgagtgcagaacccgcaagtgtaatgggcatgctgatacctgtcacttcgacgttaatgtgtgggaggcatcagggagtcgtagtggtggtgtctgtgatgactgtcagcacaacacagaaggacagtattgccagaggtgcaagccaggcttctatcgtgacctgcggagacccttctcagctccagatgcttgcaaaccgtgttcctgccatccagtaggatcagctgtccttcctgccaactcagtgaccttctgcgaccccagcaatggtgactgcccttgcaagcctggggtggcagggcgacgttgtgacaggtgcatggtgggatactggggcttcggagactatggctgtcgaccatgtgactgtgcggggagctgtgaccctatcaccggagactgcatcagcagccacacagacatagactggtgtcatgaagttcctgacttccgtcccgtgcacaataagagcgaaccagcctgggagtgggaggatgcgcaggggttttctgcacttctacactcaggtaaatgcgaatgtaaggaacagacattaggaaatgccaaggcattctgtggaatgaaatattcatatgtgctaaaaataaagattttatcagctcatgataaaggtactcatgttgaggtcaatgtgaagattaaaaaggtcttaaaatctaccaaactgaagattttccgaggaaagcgaacattatatccagaatcatggacggacagaggatgcacttgtccaatcctcaatcctggtttggaataccttgtagcaggacatgaggatataagaacaggcaaactaattgtgaatatgaaaagctttgtccagcactggaaaccttctcttggaagaaaagtcatggatattttaaaaagagagtgcaagtag

SEQ ID NO: 126 - protein, 609 aa, Homo sapiens
LSGVAGVSSRCEKACNPRMGNLALGRKLWADTTCGQNATELYCFYSENKDLTCRQPKCDKCNAAYPHLAHLPSAMADSSFRFPRTWWQSAEDVHREKIQLDLEAEFYFTHLIVMFKSPRPAAMVLDRSQDFGKTWKPYKYFATNCSATFGLEDDVVKKGAICTSKYSSPFPCTGGEVIFKALSPPHDTENPYSAKVQEQLKITNLRVQLLKRQSCPCQRNDLNEEPQHFTHYAIYDFIVKGSCFCNGHADQCIPVHGFRPVKAPGTFHMVHGKCMCKHNTAGSHCQHCAPLYNDRPWEAADGKTGAPNECRTRKCNGHADTCHFDVNVWEASGSRSGGVCDDCQHNTEGQYCQRCKPGFYRDLRRPFSAPDACKPCSCHPVGSAVLPANSVTFCDPSNGDCPCKPGVAGRRCDRCMVGYWGFGDYGCRPCDCAGSCDPITGDCISSHTDIDWCHEVPDFRPVHNKSEPAWEWEDAQGFSALLHSGKCECKEQTLGNAKAFCGMKYSYVLKIKILSAHDKGTHVEVNVKIKKVLKSTKLKIFRGKRTLYPESWTDRGCTCPILNPGLEYLVAGHEDIRTGKLIVNMKSFVQHWKPSLGRKVMDILKRECK

SEQ ID NO: 127 - DNA, 1830 bp, Homo sapiens
  CDS (1)..(1830)
ctgagtggagtagctggagtgagttcccgctgtgaaaaagcctgcaaccctcggatgggaaatttggctttggggcgaaaactctgggcagacaccacctgcggtcagaatgctaccgaactgtactgcttctacagtgagaacaaggatctgacttgtcggcagcccaaatgtgacaagtgcaatgctgcctatcctcacctggctcacctgccatctgccatggcagactcatccttccggtttcctcgcacatggtggcagtctgcggaggatgtgcacagagaaaagatccagttagacctggaagctgaattctacttcactcacctaattgtgatgttcaagtcccccaggccggctgccatggtgctggaccgctcccaggactttgggaaaacatggaagccttataagtactttgcgactaactgctccgctacatttggcctggaagatgatgttgtcaagaagggcgctatttgtacttctaaatactccagtccttttccatgcactggaggagaggttattttcaaagctttgtcaccaccacacgatacagagaacccttacagtgccaaagttcaggagcagctgaagatcaccaaccttcgcgtgcagctgctgaaacgacagtcttgtccctgtcagagaaatgacctgaacgaagagcctcaacattttacacactatgcgatctatgatttcattgtcaagggcagctgcttctgcaatggccacgccgatcaatgcatacctgttcatggcttcagacctgtcaaggccccaggaacattccacatggtccatgggaagtgtatgtgtaagcacaacacagcaggcagccactgccagcactgtgccccgttatacaatgaccggccatgggaggcagctgatggcaaaacgggggctcccaacgagtgcagaacccgcaagtgtaatgggcatgctgatacctgtcacttcgacgttaatgtgtgggaggcatcagggaatcgtagtggtggtgtctgtgatgactgtcagcacaacacagaaggacagtattgccagaggtgcaagccaggcttctatcgtgacctgcggagacccttctcagctccagatgcttgcaaaccgtgttcctgccatccagtaggatcagctgtccttcctgccaactcagtgaccttctgcgaccccagcaatggtgactgcccttgcaagcctggggtggcagggcgacgttgtgacaggtgcatggtgggatactggggcttcggagactatggctgtcgaccatgtgactgtgcggggagctgtgaccctatcaccggagactgcatcagcagccacacagacatagactggtatcatgaagttcctgacttccgtcccgtgcacaataagagcgaaccagcctgggagtgggaggatgcgcaggggttttctgcacttctacactcaggtaaatgcgaatgtaaggaacagacattaggaaatgccaaggcattctgtggaatgaaatattcatatgtgctaaaaataaagattttatcagctcatgataaaggtactcatgttgaggtcaatgtgaagattaaaaaggtcttaaaatctaccaaactgaagattttccgaggaaagcgaacattatatccagaatcatggacggacagaggatgcacttgtccaatcctcaatcctggtttggaataccttgtagcaggacatgaggatataagaacaggcaaactaattgtgaatatgaaaagctttgtccagcactggaaaccttctcttggaagaaaagtcatggatattttaaaaagagagtgcaagtag

SEQ ID NO: 128 - protein, 609 aa, Homo sapiens
LSGVAGVSSRCEKACNPRMGNLALGRKLWADTTCGQNATELYCFYSENKDLTCRQPKCDKCNAAYPHLAHLPSAMADSSFRFPRTWWQSAEDVHREKIQLDLEAEFYFTHLIVMFKSPRPAAMVLDRSQDFGKTWKPYKYFATNCSATFGLEDDVVKKGAICTSKYSSPFPCTGGEVIFKALSPPHDTENPYSAKVQEQLKITNLRVQLLKRQSCPCQRNDLNEEPQHFTHYAIYDFIVKGSCFCNGHADQCIPVHGFRPVKAPGTFHMVHGKCMCKHNTAGSHCQHCAPLYNDRPWEAADGKTGAPNECRTRKCNGHADTCHFDVNVWEASGNRSGGVCDDCQHNTEGQYCQRCKPGFYRDLRRPFSAPDACKPCSCHPVGSAVLPANSVTFCDPSNGDCPCKPGVAGRRCDRCMVGYWGFGDYGCRPCDCAGSCDPITGDCISSHTDIDWYHEVPDFRPVHNKSEPAWEWEDAQGFSALLHSGKCECKEQTLGNAKAFCGMKYSYVLKIKILSAHDKGTHVEVNVKIKKVLKSTKLKIFRGKRTLYPESWTDRGCTCPILNPGLEYLVAGHEDIRTGKLIVNMKSFVQHWKPSLGRKVMDILKRECK

SEQ ID NO: 129 - DNA, 1830 bp, Homo sapiens
  CDS (1)..(1830)
ctgagtggagtagctggagtgagttcccgctgtgaaaaagcctgcaaccctcggatgggaaatttggctttggggcgaaaactctgggcagacaccacctgcggtcagaatgctaccgaactgtactgcttctacagtgagaacaaggatctgacttgtcggcagcccaaatgtgacaagtgcaatgctgcctatcctcacctggctcacctgccatctgccatggcagactcatccttccggtttcctcgcacatggtggcagtctgcggaggatgtgcacagagaaaagatccagttagacctggaagctgaattctacttcactcacctaattgtgatgttcaagtcccccaggccggctgccatggtgctggaccgctcccaggactttgggaaaacatggaagccttataagtactttgcgactaactgctccgctacatttggcctggaagatgatgttgtcaagaagggcgctatttgtacttctaaatactccagtccttttccatgcactggaggagaggttattttcaaagctttgtcaccaccacacgatacagagaacccttacagtgccaaagttcaggagcagctgaagatcaccaaccttcgcgtgcagctgctgaaacgacagtcttgtccctgtcagagaaatgacctgaacgaagagcctcaacattttacacactatgcgatctatgatttcattgtcaagggcagctgcttctgcaatggccacgccgatcaatgcatacctgttcatggcttcagacctgtcaaggccccaggaacattccacatggtccatgggaagtgtatgtgtaagcacaacacagcaggcagccactgccagcactgtgccccgttatacaatgaccggccatgggaggcagctgatggcaaaacgggggctcccaacgagtgcagaacctgcaagtgtaatgggcatgctgatacctgtcacttcgacgttaatgtgtgggaggcatcagggagtcgtagtggtggtgtctgtgatgactgtcagcacaacacagaaggacagtattgccagaggtgcaagccaggcttctatcgtgacctgcggagacccttctcagctccagatgcttgcaaaccgtgttcctgccatccagtaggatcagctgtccttcctgccaactcagtgaccttctgcgaccccagcaatggtgactgcccttgcaagcctggggtggcagggcgacgttgtgacaggtgcatggtgggatactggggcttcggagactatggctgtcgaccatgtgactgtgcggggagctgtgaccctatcaccggagactgcatcagcagccacacagacatagactggtatcatgaagttcctgacttccgtcccgtgcacaataagagcgaaccagcctgggagtgggaggatgcgcaggggttttctgcacttctacactcaggtaaatgcgaatgtaaggaacagacattaggaaatgccaaggcattctgtggaatgaaatattcatatgtgctaaaaataaagattttatcagctcatgataaaggtactcatgttgaggtcaatgtgaagattaaaaaggtcttaaaatctaccaaactgaagattttccgaggaaagcgaacattatatccagaatcatggacggacagaggatgcacttgtccaatcctcaatcctggtttggaataccttgtagcaggacatgaggatataagaacaggcaaactaattgtgaatatgaaaagctttgtccagcactggaaaccttctcttggaagaaaagtcatggatattttaaaaagagagtgcaagtag

SEQ ID NO: 130 - protein, 609 aa, Homo sapiens
LSGVAGVSSRCEKACNPRMGNLALGRKLWADTTCGQNATELYCFYSENKDLTCRQPKCDKCNAAYPHLAHLPSAMADSSFRFPRTWWQSAEDVHREKIQLDLEAEFYFTHLIVMFKSPRPAAMVLDRSQDFGKTWKPYKYFATNCSATFGLEDDVVKKGAICTSKYSSPFPCTGGEVIFKALSPPHDTENPYSAKVQEQLKITNLRVQLLKRQSCPCQRNDLNEEPQHFTHYAIYDFIVKGSCFCNGHADQCIPVHGFRPVKAPGTFHMVHGKCMCKHNTAGSHCQHCAPLYNDRPWEAADGKTGAPNECRTCKCNGHADTCHFDVNVWEASGSRSGGVCDDCQHNTEGQYCQRCKPGFYRDLRRPFSAPDACKPCSCHPVGSAVLPANSVTFCDPSNGDCPCKPGVAGRRCDRCMVGYWGFGDYGCRPCDCAGSCDPITGDCISSHTDIDWYHEVPDFRPVHNKSEPAWEWEDAQGFSALLHSGKCECKEQTLGNAKAFCGMKYSYVLKIKILSAHDKGTHVEVNVKIKKVLKSTKLKIFRGKRTLYPESWTDRGCTCPILNPGLEYLVAGHEDIRTGKLIVNMKSFVQHWKPSLGRKVMDILKRECK

SEQ ID NO: 131 - DNA, 1830 bp, Homo sapiens
  CDS (1)..(1830)
ctgagtggagtagctggagtgagttcccgctgtgaaaaagcctgcaaccctcggatgggaaatttggctttggggcgaaaactctgggcagacaccacctgcggtcagaatgctaccgaactgtactgcttctacagtgagaacaaggatctgacttgtcggcagcccaaatgtgacaagtgcaatgctgcctatcctcacctggctcacctgccatctgccatggcagactcatccttccggtttcctcgcacatggtggcagtctgcggaggatgtgcacagagaaaagatccagttagacctggaagctgaattctacttcactcacctaattgtgatgttcaagtcccccaggccggctgccatggtgctggaccgctcccaggactttgggaaaacatggaagccttataagtactttgcgactaactgctccgctacatttggcctggaagatgatgttgtcaagaagggcgctatttgtacttctaaatactccagtccttttccatgcactggaggagaggttattttcaaagctttgtcaccaccacacgatacagagaacccttacagtgccaaagttcaggagcagctgaagatcaccaaccttcgcgtgcagctgctgaaacgacagtcttgtccctgtcagagaaatgacctgaacgaagagcctcaacattttacacactatgcgatctatgatttcattgtcaagggcagctgcttctgcaatggccacgccgatcaatgcatacctgttcatggcttcagacctgtcaaggccccaggaacattccacatggtccatgggaagtgtatgtgtaagcacaacacagcaggcagccactgccagcactgtgccccgttatacaatgaccggccatgggaggcagctgatggcaaaacgggggctcccaacgagtgcagaacccgcaagtgtaatgggcatgctgatacctgtcacttcgacgttaatgtgtgggaggcatcagggagtcgtagtggtggtgtctgtgatgactgtcagcacaacacagaaggacagtattgccagaggtgcaagccaggcttctatcgtgacctgcggagacccttctcagctccagatgcttgcaaaccgtgttcctgccatccagtaggatcagctgtccttcctgccaactcagtgaccttctgcgaccccagcaatggtgactgcccttgcaagcctggggtggcagggcgacgttgtgacaggtgcatggtgggatactggggcttcggagactatggctgtcgaccatgtgactgtgcggggagctgtgaccctatcaccggagactgcatcagcagccacacagacatagactggtatcatgaagttcctgacttccgtcccgtgcacaataagagcgaaccagcctgggagtgggaggatgcgcaggggttttctgcacttctacactcaggtaaatgcgaatgtaaggaacagacattaggaaatgccaaggcattctgtggaatgaaatattcatatgtgctaaaaataaagattttatcagctcatgataaaggtactcatgttgaggtcaatgtgaagattaaaaaggtcttaaaatctaccaaactgaagattttccgaggaaagcgaacattatatccagaatcatggacggacagaggatgcacttgtccaatcctcaatcctggtttggaataccttgtagcaggacatgaggatataagaacaggcaaactaattgtgaatatgaaaagctttgtccagcactggaaaccttctcttggaagaaaagtcatggatattttaaaaagagagtgcaagtag

SEQ ID NO: 132 - protein, 609 aa, Homo sapiens
LSGVAGVSSRCEKACNPRMGNLALGRKLWADTTCGQNATELYCFYSENKDLTCRQPKCDKCNAAYPHLAHLPSAMADSSFRFPRTWWQSAEDVHREKIQLDLEAEFYFTHLIVMFKSPRPAAMVLDRSQDFGKTWKPYKYFATNCSATFGLEDDVVKKGAICTSKYSSPFPCTGGEVIFKALSPPHDTENPYSAKVQEQLKITNLRVQLLKRQSCPCQRNDLNEEPQHFTHYAIYDFIVKGSCFCNGHADQCIPVHGFRPVKAPGTFHMVHGKCMCKHNTAGSHCQHCAPLYNDRPWEAADGKTGAPNECRTRKCNGHADTCHFDVNVWEASGSRSGGVCDDCQHNTEGQYCQRCKPGFYRDLRRPFSAPDACKPCSCHPVGSAVLPANSVTFCDPSNGDCPCKPGVAGRRCDRCMVGYWGFGDYGCRPCDCAGSCDPITGDCISSHTDIDWYHEVPDFRPVHNKSEPAWEWEDAQGFSALLHSGKCECKEQTLGNAKAFCGMKYSYVLKIKILSAHDKGTHVEVNVKIKKVLKSTKLKIFRGKRTLYPESWTDRGCTCPILNPGLEYLVAGHEDIRTGKLIVNMKSFVQHWKPSLGRKVMDILKRECK

SEQ ID NO: 133 - DNA, 1821 bp, Homo sapiens
  CDS (1)..(1821)
aaagcctgcaaccctcggatgggaaatttggctttggggcgaaaactctgggcagacaccacctgcggtcagaatgctaccgaactgtactgcttctacagtgagaacacggatctgacttgtcggcagcccaaatgtgacaagtgcaatgctgcctatcctcacctggctcacctgccatctgccatggcagactcatccttccggtttcctcgcacatggtggcagtctgcggaggatgtgcacagagaaaagatccagttagacctggaagctgaattctacttcactcacctaattgtgatgttcaagtcccccaggccggctgccatggtgctggaccgctcccaggactttgggaaaacatggaagccttataagtactttgcgactaactgctccgctacatttggcctggaagatgatgttgtcaagaagggcgctatttgtactcctaaatactccagtccttttccatgcactggaggagaggttattttcaaagctttgtcaccaccatacgatacagagaacccttacagtgccaaagttcaggagcagctgaagatcaccaaccttcgcgtgcagctgctgaaacgacagtcttatccctgtcagagaaatgacctgaacgaagagcctcaacattttacacactatgcgatctatgatttcattgtcaagggcagctgcttctgcaatggccacgccgatcaatgcatacctgttcatggcttcagacctgtcaaggccccaggaacattccacatggtccatgggaagtgtatgtgtaagcacaacacagcaggcagccactgccagcactgtgccccgttatacaatgaccggccatgggaggcagctgatggcaaaacgggggctcccaacgagtgcagaacccgcaagtgtaatgggcatgctgatacctgtcacttcgacgttaatgtgtgggaggcatcagggagtcgtagtggtggtgtctgtgatgactgtcagcacaacacagaaggacagtattgccagaggtgcaagccaggcttctatcgtgacctgcggagacccttctcagctccagatgcttgcaaaccgtgttcctgccatccagtaggatcagctgtccttcctgccaactcagtgaccttctgcgaccccagcaatggtgactgcccttgcaagcctggggtggcagggcgacgttgtgacaggtgcatggtgggatactggggcttcggagactatggctgtcgaccatgtgactgtgcggggagctgtgaccctatcaccggagactgcatcagcagccacacagacatagactggtatcatgaagttcctgacttccgtcccgtgcacaataagagcgaaccagcctgggagtgggaggatgcgcaggggttttctgcacttctacactcaggtaaatgcgaatgtaaggaacagacattaggaaaggccaaggcattctgtggaatgaaatattcatatgtgctaaaaataaagattttatcagctcatgataaaggtactcatgttgaggtcaatgtgaagattaaaaaggtcttaaaatctaccaaactgaagattttccgaggaaagcgaacattatatccagaatcatggacggacagaggatgcacttgtccaatcctcaatcctggtttggaataccttgcagcaggacatgaggatataagaacaggcaaactaattgtgaatatgaaaagctttgtccagcactggaaaccttctcttggaagaaaagtcatggatattttaaaagagagtgcaagtggatccgagctcggtaccaagcttacgtag

SEQ ID NO: 134 - protein, 606 aa, Homo sapiens
KACNPRMGNLALGRKLWADTTCGQNATELYCFYSENTDLTCRQPKCDKCNAAYPHLAHLPSAMADSSFRFPRTWWQSAEDVHREKIQLDLEAEFYFTHLIVMFKSPRPAAMVLDRSQDFGKTWKPYKYFATNCSATFGLEDDVVKKGAICTPKYSSPFPCTGGEVIFKALSPPYDTENPYSAKVQEQLKITNLRVQLLKRQSYPCQRNDLNEEPQHFTHYAIYDFIVKGSCFCNGHADQCIPVHGFRPVKAPGTFHMVHGKCMCKHNTAGSHCQHCAPLYNDRPWEAADGKTGAPNECRTRKCNGHADTCHFDVNVWEASGSRSGGVCDDCQHNTEGQYCQRCKPGFYRDLRRPFSAPDACKPCSCHPVGSAVLPANSVTFCDPSNGDCPCKPGVAGRRCDRCMVGYWGFGDYGCRPCDCAGSCDPITGDCISSHTDIDWYHEVPDFRPVHNKSEPAWEWEDAQGFSALLHSGKCECKEQTLGKAKAFCGMKYSYVLKIKILSAHDKGTHVEVNVKIKKVLKSTKLKIFRGKRTLYPESWTDRGCTCPILNPGLEYLAAGHEDIRTGKLIVNMKSFVQHWKPSLGRKVMDILKESASGSELGTKLT

SEQ ID NO: 135 - DNA, 1791 bp, Homo sapiens
  CDS (1)..(1791)
aaagcctgcaaccctcggatgggaaatttggctttggggcgaaaactctgggcagacaccacctgcggtcagaatgctaccgaactgtactgcttctacagtgagaacacggatctgacttgtcggcagcccaaatgtgacaagtgcaatgctgcctatcctcacctggctcacctgccatctgccatggcagactcatccttccggtttcctcgcacatggtggcagtctgcggaggatgtgcacagagaaaagatccagttagacctggaagctgaattctacttcactcacctaattgtgatgttcaagtcccccaggccggctgccatggtgctggaccgctcccaggactttgggaaaacatggaagccttataagtactttgcgactaactgctccgctacatttggcctggaagatgatgttgtcaagaagggcgctatttgtactcctaaatactccagtccttttccatgcactggaggagaggttattttcaaagctttgtcaccaccatacgatacagagaacccttacagtgccaaagttcaggagcagctgaagatcaccaaccttcgcgtgcagctgctgaaacgacagtcttatccctgtcagagaaatgacctgaacgaagagcctcaacattttacacactatgcgatctatgatttcattgtcaagggcagctgcttctgcaatggccacgccgatcaatgcatacctgttcatggcttcagacctgtcaaggccccaggaacattccacatggtccatgggaagtgtatgtgtaagcacaacacagcaggcagccactgccagcactgtgccccgttatacaatgaccggccatgggaggcagctgatggcaaaacgggggctcccaacgagtgcagagcccgcaagtgtaatgggcatgctgatacctgtcacttcgacgttaatgtgtgggaggcatcagggagtcgtagtggtggtgtctgtgatgactgtcagcacaacacagaaggacagtattgccagaggtgcaagccaggcttctatcgtgacctgcggagacccttctcagctccagatgcttgcaaaccgtgttcctgccatccagtaggatcagctgtccttcctgccaactcagtgaccttctgcgaccccagcaatggtgactgcccttgcaagcctggggtggcagggcgacgttgtgacaggtgcatggtgggatactggggcttcggagactatggctgtcgaccatgtgactgtgcggggagctgtgaccctatcaccggagactgcatcagcagccacacagacatagactggtatcatgaagttcctgacttccgtcccgtgcacaataagagcgaaccagcctgggagtgggaggatgcgcaggggttttctgcacttctacactcaggtaaatgcgaatgtaaggaacagacattaggaaaggccaaggcattctgtggaatgaaatattcatatgtgctaaaaataaagattttatcagctcatgataaaggtactcatgttgaggtcaatgtgaagattaaaaaggtcttaaaatctaccaaactgaagattttccgaggaaagcgaacattatatccagaatcatggacggacagaggatgcacttgtccaatcctcaatcctggtttggaataccttgcagcaggacatgaggatataagaacaggcaaactaattgtgaatatgaaaagctttgtccagcactggaaaccttctcttggaagaaaagtcatggatattttaaaagagagtgcaagt

SEQ ID NO: 136 - protein, 597 aa, Homo sapiens
KACNPRMGNLALGRKLWADTTCGQNATELYCFYSENTDLTCRQPKCDKCNAAYPHLAHLPSAMADSSFRFPRTWWQSAEDVHREKIQLDLEAEFYFTHLIVMFKSPRPAAMVLDRSQDFGKTWKPYKYFATNCSATFGLEDDVVKKGAICTPKYSSPFPCTGGEVIFKALSPPYDTENPYSAKVQEQLKITNLRVQLLKRQSYPCQRNDLNEEPQHFTHYAIYDFIVKGSCFCNGHADQCIPVHGFRPVKAPGTFHMVHGKCMCKHNTAGSHCQHCAPLYNDRPWEAADGKTGAPNECRARKCNGHADTCHFDVNVWEASGSRSGGVCDDCQHNTEGQYCQRCKPGFYRDLRRPFSAPDACKPCSCHPVGSAVLPANSVTFCDPSNGDCPCKPGVAGRRCDRCMVGYWGFGDYGCRPCDCAGSCDPITGDCISSHTDIDWYHEVPDFRPVHNKSEPAWEWEDAQGFSALLHSGKCECKEQTLGKAKAFCGMKYSYVLKIKILSAHDKGTHVEVNVKIKKVLKSTKLKIFRGKRTLYPESWTDRGCTCPILNPGLEYLAAGHEDIRTGKLIVNMKSFVQHWKPSLGRKVMDILKESAS

SEQ ID NO: 137 - DNA, 1791 bp, Homo sapiens
  CDS (1)..(1791)
aaagcctgcaaccctcggatgggaaatttggctttggggcgaaaactctgggcagacaccacctgcggtcagaatgctaccgaactgtactgcttctacagtgagaacacggatctgacttgtcggcagcccaaatgtgacaagtgcaatgctgcctatcctcacctggctcacctgccatctgccatggcagactcatccttccggtttcctcgcacatggtggcagtctgcggaggatgtgcacagagaaaagatccagttagacctggaagctgaattctacttcactcacctaattgtgatgttcaagtcccccaggccggctgccatggtgctggaccgctcccaggactttgggaaaacatggaagccttataagtactttgcgactaactgctccgctacatttggcctggaagatgatgttgtcaagaagggcgctatttgtactcctaaatactccagtccttttccatgcactggaggagaggttattttcaaagctttgtcaccaccatacgatacagagaacccttacagtgccaaagttcaggagcagctgaagatcaccaaccttcgcgtgcagctgctgaaacgacagtcttatccctgtcagagaaatgacctgaacgaagagcctcaacattttacacactatgcgatctatgatttcattgtcaagggcagctgcttctgcaatggccacgccgatcaatgcatacctgttcatggcttcagacctgtcaaggccccaggaacattccacatggtccatgggaagtgtatgtgtaagcacaacacagcaggcagccactgccagcactgtgccccgttatacaatgaccggccatgggaggcagctgatggcaaaacgggggctcccaacgagtgcagaacctgcaagtgtaatgggcatgctgatacctgtcacttcgacgttaatgtgtgggaggcatcagggagtcgtagtggtggtgtctgtgatgactgtcagcacaacacagaaggacagtattgccagaggtgcaagccaggcttctatcgtgacctgcggagacccttctcagctccagatgcttgcaaaccgtgttcctgccatccagtaggatcagctgtccttcctgccaactcagtgaccttctgcgaccccagcaatggtgactgcccttgcaagcctggggtggcagggcgacgttgtgacaggtgcatggtgggatactggggcttcggagactatggctgtcgaccatgtgactgtgcggggagctgtgaccctatcaccggagactgcatcagcagccacacagacatagactggtatcatgaagttcctgacttccgtcccgtgcacaataagagcgaaccagcctgggagtgggaggatgcgcaggggttttctgcacttctacactcaggtaaatgcgaatgtaaggaacagacattaggaaaggccaaggcattctgtggaatgaaatattcatatgtgctaaaaataaagattttatcagctcatgataaaggtactcatgttgaggtcaatgtgaagattaaaaaggtcttaaaatctaccaaactgaagattttccgaggaaagcgaacattatatccagaatcatggacggacagaggatgcacttgtccaatcctcaatcctggtttggaataccttgcagcaggacatgaggatataagaacaggcaaactaattgtgaatatgaaaagctttgtccagcactggaaaccttctcttggaagaaaagtcatggatattttaaaagagagtgcaagt

SEQ ID NO: 138 - protein, 597 aa, Homo sapiens
KACNPRMGNLALGRKLWADTTCGQNATELYCFYSENTDLTCRQPKCDKCNAAYPHLAHLPSAMADSSFRFPRTWWQSAEDVHREKIQLDLEAEFYFTHLIVMFKSPRPAAMVLDRSQDFGKTWKPYKYFATNCSATFGLEDDVVKKGAICTPKYSSPFPCTGGEVIFKALSPPYDTENPYSAKVQEQLKITNLRVQLLKRQSYPCQRNDLNEEPQHFTHYAIYDFIVKGSCFCNGHADQCIPVHGFRPVKAPGTFHMVHGKCMCKHNTAGSHCQHCAPLYNDRPWEAADGKTGAPNECRTCKCNGHADTCHFDVNVWEASGSRSGGVCDDCQHNTEGQYCQRCKPGFYRDLRRPFSAPDACKPCSCHPVGSAVLPANSVTFCDPSNGDCPCKPGVAGRRCDRCMVGYWGFGDYGCRPCDCAGSCDPITGDCISSHTDIDWYHEVPDFRPVHNKSEPAWEWEDAQGFSALLHSGKCECKEQTLGKAKAFCGMKYSYVLKIKILSAHDKGTHVEVNVKIKKVLKSTKLKIFRGKRTLYPESWTDRGCTCPILNPGLEYLAAGHEDIRTGKLIVNMKSFVQHWKPSLGRKVMDILKESAS

SEQ ID NO: 139 - DNA, 1791 bp, Homo sapiens
  CDS (1)..(1791)
aaagcctgcaaccctcggatgggaaatttggctttggggcgaaaactctgggcagacaccacctgcggtcagaatgctaccgaactgtactgcttctacagtgagaacacggatctgacttgtcggcagcccaaatgtgacaagtgcaatgctgcctatcctcacctggctcacctgccatctgccatggcagactcatccttccggtttcctcgcacatggtggcagtctgcggaggatgtgcacagagaaaagatccagttagacctggaagctgaattctacttcactcacctaattgtgatgttcaagtcccccaggccggctgccatggtgctggaccgctcccaggactttgggaaaacatggaagccttataagtactttgcgactaactgctccgctacatttggcctggaagatgatgttgtcaagaagggcgctatttgtactcctaaatactccagtccttttccatgcactggaggagaggttattttcaaagctttgtcaccaccatacgatacagagaacccttacagtgccaaagttcaggagcagctgaagatcaccaaccttcgcgtgcagctgctgaaacgacagtcttatccctgtcagagaaatgacctgaacgaagagcctcaacattttacacactatgcgatctatgatttcattgtcaagggcagctgcttctgcaatggccacgccgatcaatgcatacctgttcatggcttcagacctgtcaaggccccaggaacattccacatggtccatgggaagtgtatgtgtaagcacaacacagcaggcagccactgccagcactgtgccccgttatacaatgaccggccatgggaggcagctgatggcaaaacgggggctcccaacgagtgcagaacccgcaagtgtaatgggcatgctgatacctgtcacttcgacgttaatgtgtgggaggcatcagggaatcgtagtggtggtgtctgtgatgactgtcagcacaacacagaaggacagtattgccagaggtgcaagccaggcttctatcgtgacctgcggagacccttctcagctccagatgcttgcaaaccgtgttcctgccatccagtaggatcagctgtccttcctgccaactcagtgaccttctgcgaccccagcaatggtgactgcccttgcaagcctggggtggcagggcgacgttgtgacaggtgcatggtgggatactggggcttcggagactatggctgtcgaccatgtgactgtgcggggagctgtgaccctatcaccggagactgcatcagcagccacacagacatagactggtatcatgaagttcctgacttccgtcccgtgcacaataagagcgaaccagcctgggagtgggaggatgcgcaggggttttctgcacttctacactcaggtaaatgcgaatgtaaggaacagacattaggaaaggccaaggcattctgtggaatgaaatattcatatgtgctaaaaataaagattttatcagctcatgataaaggtactcatgttgaggtcaatgtgaagattaaaaaggtcttaaaatctaccaaactgaagattttccgaggaaagcgaacattatatccagaatcatggacggacagaggatgcacttgtccaatcctcaatcctggtttggaataccttgcagcaggacatgaggatataagaacaggcaaactaattgtgaatatgaaaagctttgtccagcactggaaaccttctcttggaagaaaagtcatggatattttaaaagagagtgcaagt

SEQ ID NO: 140 - protein, 597 aa, Homo sapiens
KACNPRMGNLALGRKLWADTTCGQNATELYCFYSENTDLTCRQPKCDKCNAAYPHLAHLPSAMADSSFRFPRTWWQSAEDVHREKIQLDLEAEFYFTHLIVMFKSPRPAAMVLDRSQDFGKTWKPYKYFATNCSATFGLEDDVVKKGAICTPKYSSPFPCTGGEVIFKALSPPYDTENPYSAKVQEQLKITNLRVQLLKRQSYPCQRNDLNEEPQHFTHYAIYDFIVKGSCFCNGHADQCIPVHGFRPVKAPGTFHMVHGKCMCKHNTAGSHCQHCAPLYNDRPWEAADGKTGAPNECRTRKCNGHADTCHFDVNVWEASGNRSGGVCDDCQHNTEGQYCQRCKPGFYRDLRRPFSAPDACKPCSCHPVGSAVLPANSVTFCDPSNGDCPCKPGVAGRRCDRCMVGYWGFGDYGCRPCDCAGSCDPITGDCISSHTDIDWYHEVPDFRPVHNKSEPAWEWEDAQGFSALLHSGKCECKEQTLGKAKAFCGMKYSYVLKIKILSAHDKGTHVEVNVKIKKVLKSTKLKIFRGKRTLYPESWTDRGCTCPILNPGLEYLAAGHEDIRTGKLIVNMKSFVQHWKPSLGRKVMDILKESAS

SEQ ID NO: 141 - DNA, 1791 bp, Homo sapiens
  CDS (1)..(1791)
aaagcctgcaaccctcggatgggaaatttggctttggggcgaaaactctgggcagacaccacctgcggtcagaatgctaccgaactgtactgcttctacagtgagaacacggatctgacttgtcggcagcccaaatgtgacaagtgcaatgctgcctatcctcacctggctcacctgccatctgccatggcagactcatccttccggtttcctcgcacatggtggcagtctgcggaggatgtgcacagagaaaagatccagttagacctggaagctgaattctacttcactcacctaattgtgatgttcaagtcccccaggccggctgccatggtgctggaccgctcccaggactttgggaaaacatggaagccttataagtactttgcgactaactgctccgctacatttggcctggaagatgatgttgtcaagaagggcgctatttgtactcctaaatactccagtccttttccatgcactggaggagaggttattttcaaagctttgtcaccaccatacgatacagagaacccttacagtgccaaagttcaggagcagctgaagatcaccaaccttcgcgtgcagctgctgaaacgacagtcttatccctgtcagagaaatgacctgaacgaagagcctcaacattttacacactatgcgatctatgatttcattgtcaagggcagctgcttctgcaatggccacgccgatcaatgcatacctgttcatggcttcagacctgtcaaggccccaggaacattccacatggtccatgggaagtgtatgtgtaagcacaacacagcaggcagccactgccagcactgtgccccgttatacaatgaccggccatgggaggcagctgatggcaaaacgggggctcccaacgagtgcagaacccgcaagtgtaatgggcatgctgatacctgtcacttcgacgttaatgtgtgggaggcatcagggagtcgtagtggtggtgtctgtgatgactgtcagcacaacacagaaggacagtattgccagaggtgcaagccaggcttctatcgtgacctgcggagacccttctcagctccagatgcttgcaaaccgtgttcctgccatccagtaggatcagctgtccttcctgccaactcagtgaccttctgcgaccccagcaatggtgactgcccttgcaagcctggggtggcagggcgacgttgtgacaggtgcatggtgggatactggggcttcggagactatggctgtcgaccatgtgactgtgcggggagctgtgaccctatcaccggagactgcatcagcagccacacagacatagactggtgtcatgaagttcctgacttccgtcccgtgcacaataagagcgaaccagcctgggagtgggaggatgcgcaggggttttctgcacttctacactcaggtaaatgcgaatgtaaggaacagacattaggaaaggccaaggcattctgtggaatgaaatattcatatgtgctaaaaataaagattttatcagctcatgataaaggtactcatgttgaggtcaatgtgaagattaaaaaggtcttaaaatctaccaaactgaagattttccgaggaaagcgaacattatatccagaatcatggacggacagaggatgcacttgtccaatcctcaatcctggtttggaataccttgcagcaggacatgaggatataagaacaggcaaactaattgtgaatatgaaaagctttgtccagcactggaaaccttctcttggaagaaaagtcatggatattttaaaagagagtgcaagt

SEQ ID NO: 142 - protein, 597 aa, Homo sapiens
KACNPRMGNLALGRKLWADTTCGQNATELYCFYSENTDLTCRQPKCDKCNAAYPHLAHLPSAMADSSFRFPRTWWQSAEDVHREKIQLDLEAEFYFTHLIVMFKSPRPAAMVLDRSQDFGKTWKPYKYFATNCSATFGLEDDVVKKGAICTPKYSSPFPCTGGEVIFKALSPPYDTENPYSAKVQEQLKITNLRVQLLKRQSYPCQRNDLNEEPQHFTHYAIYDFIVKGSCFCNGHADQCIPVHGFRPVKAPGTFHMVHGKCMCKHNTAGSHCQHCAPLYNDRPWEAADGKTGAPNECRTRKCNGHADTCHFDVNVWEASGSRSGGVCDDCQHNTEGQYCQRCKPGFYRDLRRPFSAPDACKPCSCHPVGSAVLPANSVTFCDPSNGDCPCKPGVAGRRCDRCMVGYWGFGDYGCRPCDCAGSCDPITGDCISSHTDIDWCHEVPDFRPVHNKSEPAWEWEDAQGFSALLHSGKCECKEQTLGKAKAFCGMKYSYVLKIKILSAHDKGTHVEVNVKIKKVLKSTKLKIFRGKRTLYPESWTDRGCTCPILNPGLEYLAAGHEDIRTGKLIVNMKSFVQHWKPSLGRKVMDILKESAS

SEQ ID NO: 143 - DNA, 1791 bp, Homo sapiens
  CDS (1)..(1791)
aaagcctgcaaccctcggatgggaaatttggctttggggcgaaaactctgggcagacaccacctgcggtcagaatgctaccgaactgtactgcttctacagtgagaacacggatctgacttgtcggcagcccaaatgtgacaagtgcaatgctgcctatcctcacctggctcacctgccatctgccatggcagactcatccttccggtttcctcgcacatggtggcagtctgcggaggatgtgcacagagaaaagatccagttagacctggaagctgaattctacttcactcacctaattgtgatgttcaagtcccccaggccggctgccatggtgctggaccgctcccaggactttgggaaaacatggaagccttataagtactttgcgactaactgctccgctacatttggcctggaagatgatgttgtcaagaagggcgctatttgtactcctaaatactccagtccttttccatgcactggaggagaggttattttcaaagctttgtcaccaccatacgatacagagaacccttacagtgccaaagttcaggagcagctgaagatcaccaaccttcgcgtgcagctgctgaaacgacagtcttatccctgtcagagaaatgacctgaacgaagagcctcaacattttacacactatgcgatctatgatttcattgtcaagggcagctgcttctgcaatggccacgccgatcaatgcatacctgttcatggcttcagacctgtcaaggccccaggaacattccacatggtccatgggaagtgtatgtgtaagcacaacacagcaggcagccactgccagcactgtgccccgttatacaatgaccggccatgggaggcagctgatggcaaaacgggggctcccaacgagtgcagagcctgcaagtgtaatgggcatgctgatacctgtcacttcgacgttaatgtgtgggaggcatcagggagtcgtagtggtggtgtctgtgatgactgtcagcacaacacagaaggacagtattgccagaggtgcaagccaggcttctatcgtgacctgcggagacccttctcagctccagatgcttgcaaaccgtgttcctgccatccagtaggatcagctgtccttcctgccaactcagtgaccttctgcgaccccagcaatggtgactgcccttgcaagcctggggtggcagggcgacgttgtgacaggtgcatggtgggatactggggcttcggagactatggctgtcgaccatgtgactgtgcggggagctgtgaccctatcaccggagactgcatcagcagccacacagacatagactggtatcatgaagttcctgacttccgtcccgtgcacaataagagcgaaccagcctgggagtgggaggatgcgcaggggttttctgcacttctacactcaggtaaatgcgaatgtaaggaacagacattaggaaaggccaaggcattctgtggaatgaaatattcatatgtgctaaaaataaagattttatcagctcatgataaaggtactcatgttgaggtcaatgtgaagattaaaaaggtcttaaaatctaccaaactgaagattttccgaggaaagcgaacattatatccagaatcatggacggacagaggatgcacttgtccaatcctcaatcctggtttggaataccttgcagcaggacatgaggatataagaacaggcaaactaattgtgaatatgaaaagctttgtccagcactggaaaccttctcttggaagaaaagtcatggatattttaaaagagagtgcaagt

SEQ ID NO: 144 - protein, 597 aa, Homo sapiens
KACNPRMGNLALGRKLWADTTCGQNATELYCFYSENTDLTCRQPKCDKCNAAYPHLAHLPSAMADSSFRFPRTWWQSAEDVHREKIQLDLEAEFYFTHLIVMFKSPRPAAMVLDRSQDFGKTWKPYKYFATNCSATFGLEDDVVKKGAICTPKYSSPFPCTGGEVIFKALSPPYDTENPYSAKVQEQLKITNLRVQLLKRQSYPCQRNDLNEEPQHFTHYAIYDFIVKGSCFCNGHADQCIPVHGFRPVKAPGTFHMVHGKCMCKHNTAGSHCQHCAPLYNDRPWEAADGKTGAPNECRACKCNGHADTCHFDVNVWEASGSRSGGVCDDCQHNTEGQYCQRCKPGFYRDLRRPFSAPDACKPCSCHPVGSAVLPANSVTFCDPSNGDCPCKPGVAGRRCDRCMVGYWGFGDYGCRPCDCAGSCDPITGDCISSHTDIDWYHEVPDFRPVHNKSEPAWEWEDAQGFSALLHSGKCECKEQTLGKAKAFCGMKYSYVLKIKILSAHDKGTHVEVNVKIKKVLKSTKLKIFRGKRTLYPESWTDRGCTCPILNPGLEYLAAGHEDIRTGKLIVNMKSFVQHWKPSLGRKVMDILKESAS

SEQ ID NO: 145 - DNA, 1791 bp, Homo sapiens
  CDS (1)..(1791)
aaagcctgcaaccctcggatgggaaatttggctttggggcgaaaactctgggcagacaccacctgcggtcagaatgctaccgaactgtactgcttctacagtgagaacacggatctgacttgtcggcagcccaaatgtgacaagtgcaatgctgcctatcctcacctggctcacctgccatctgccatggcagactcatccttccggtttcctcgcacatggtggcagtctgcggaggatgtgcacagagaaaagatccagttagacctggaagctgaattctacttcactcacctaattgtgatgttcaagtcccccaggccggctgccatggtgctggaccgctcccaggactttgggaaaacatggaagccttataagtactttgcgactaactgctccgctacatttggcctggaagatgatgttgtcaagaagggcgctatttgtactcctaaatactccagtccttttccatgcactggaggagaggttattttcaaagctttgtcaccaccatacgatacagagaacccttacagtgccaaagttcaggagcagctgaagatcaccaaccttcgcgtgcagctgctgaaacgacagtcttatccctgtcagagaaatgacctgaacgaagagcctcaacattttacacactatgcgatctatgatttcattgtcaagggcagctgcttctgcaatggccacgccgatcaatgcatacctgttcatggcttcagacctgtcaaggccccaggaacattccacatggtccatgggaagtgtatgtgtaagcacaacacagcaggcagccactgccagcactgtgccccgttatacaatgaccggccatgggaggcagctgatggcaaaacgggggctcccaacgagtgcagagcccgcaagtgtaatgggcatgctgatacctgtcacttcgacgttaatgtgtgggaggcatcagggaatcgtagtggtggtgtctgtgatgactgtcagcacaacacagaaggacagtattgccagaggtgcaagccaggcttctatcgtgacctgcggagacccttctcagctccagatgcttgcaaaccgtgttcctgccatccagtaggatcagctgtccttcctgccaactcagtgaccttctgcgaccccagcaatggtgactgcccttgcaagcctggggtggcagggcgacgttgtgacaggtgcatggtgggatactggggcttcggagactatggctgtcgaccatgtgactgtgcggggagctgtgaccctatcaccggagactgcatcagcagccacacagacatagactggtatcatgaagttcctgacttccgtcccgtgcacaataagagcgaaccagcctgggagtgggaggatgcgcaggggttttctgcacttctacactcaggtaaatgcgaatgtaaggaacagacattaggaaaggccaaggcattctgtggaatgaaatattcatatgtgctaaaaataaagattttatcagctcatgataaaggtactcatgttgaggtcaatgtgaagattaaaaaggtcttaaaatctaccaaactgaagattttccgaggaaagcgaacattatatccagaatcatggacggacagaggatgcacttgtccaatcctcaatcctggtttggaataccttgcagcaggacatgaggatataagaacaggcaaactaattgtgaatatgaaaagctttgtccagcactggaaaccttctcttggaagaaaagtcatggatattttaaaagagagtgcaagt

SEQ ID NO: 146 - protein, 597 aa, Homo sapiens
KACNPRMGNLALGRKLWADTTCGQNATELYCFYSENTDLTCRQPKCDKCNAAYPHLAHLPSAMADSSFRFPRTWWQSAEDVHREKIQLDLEAEFYFTHLIVMFKSPRPAAMVLDRSQDFGKTWKPYKYFATNCSATFGLEDDVVKKGAICTPKYSSPFPCTGGEVIFKALSPPYDTENPYSAKVQEQLKITNLRVQLLKRQSYPCQRNDLNEEPQHFTHYAIYDFIVKGSCFCNGHADQCIPVHGFRPVKAPGTFHMVHGKCMCKHNTAGSHCQHCAPLYNDRPWEAADGKTGAPNECRARKCNGHADTCHFDVNVWEASGNRSGGVCDDCQHNTEGQYCQRCKPGFYRDLRRPFSAPDACKPCSCHPVGSAVLPANSVTFCDPSNGDCPCKPGVAGRRCDRCMVGYWGFGDYGCRPCDCAGSCDPITGDCISSHTDIDWYHEVPDFRPVHNKSEPAWEWEDAQGFSALLHSGKCECKEQTLGKAKAFCGMKYSYVLKIKILSAHDKGTHVEVNVKIKKVLKSTKLKIFRGKRTLYPESWTDRGCTCPILNPGLEYLAAGHEDIRTGKLIVNMKSFVQHWKPSLGRKVMDILKESAS

SEQ ID NO: 147 - DNA, 1791 bp, Homo sapiens
  CDS (1)..(1791)
aaagcctgcaaccctcggatgggaaatttggctttggggcgaaaactctgggcagacaccacctgcggtcagaatgctaccgaactgtactgcttctacagtgagaacacggatctgacttgtcggcagcccaaatgtgacaagtgcaatgctgcctatcctcacctggctcacctgccatctgccatggcagactcatccttccggtttcctcgcacatggtggcagtctgcggaggatgtgcacagagaaaagatccagttagacctggaagctgaattctacttcactcacctaattgtgatgttcaagtcccccaggccggctgccatggtgctggaccgctcccaggactttgggaaaacatggaagccttataagtactttgcgactaactgctccgctacatttggcctggaagatgatgttgtcaagaagggcgctatttgtactcctaaatactccagtccttttccatgcactggaggagaggttattttcaaagctttgtcaccaccatacgatacagagaacccttacagtgccaaagttcaggagcagctgaagatcaccaaccttcgcgtgcagctgctgaaacgacagtcttatccctgtcagagaaatgacctgaacgaagagcctcaacattttacacactatgcgatctatgatttcattgtcaagggcagctgcttctgcaatggccacgccgatcaatgcatacctgttcatggcttcagacctgtcaaggccccaggaacattccacatggtccatgggaagtgtatgtgtaagcacaacacagcaggcagccactgccagcactgtgccccgttatacaatgaccggccatgggaggcagctgatggcaaaacgggggctcccaacgagtgcagagcccgcaagtgtaatgggcatgctgatacctgtcacttcgacgttaatgtgtgggaggcatcagggagtcgtagtggtggtgtctgtgatgactgtcagcacaacacagaaggacagtattgccagaggtgcaagccaggcttctatcgtgacctgcggagacccttctcagctccagatgcttgcaaaccgtgttcctgccatccagtaggatcagctgtccttcctgccaactcagtgaccttctgcgaccccagcaatggtgactgcccttgcaagcctggggtggcagggcgacgttgtgacaggtgcatggtgggatactggggcttcggagactatggctgtcgaccatgtgactgtgcggggagctgtgaccctatcaccggagactgcatcagcagccacacagacatagactggtgtcatgaagttcctgacttccgtcccgtgcacaataagagcgaaccagcctgggagtgggaggatgcgcaggggttttctgcacttctacactcaggtaaatgcgaatgtaaggaacagacattaggaaaggccaaggcattctgtggaatgaaatattcatatgtgctaaaaataaagattttatcagctcatgataaaggtactcatgttgaggtcaatgtgaagattaaaaaggtcttaaaatctaccaaactgaagattttccgaggaaagcgaacattatatccagaatcatggacggacagaggatgcacttgtccaatcctcaatcctggtttggaataccttgcagcaggacatgaggatataagaacaggcaaactaattgtgaatatgaaaagctttgtccagcactggaaaccttctcttggaagaaaagtcatggatattttaaaagagagtgcaagt

SEQ ID NO: 148 - protein, 597 aa, Homo sapiens
KACNPRMGNLALGRKLWADTTCGQNATELYCFYSENTDLTCRQPKCDKCNAAYPHLAHLPSAMADSSFRFPRTWWQSAEDVHREKIQLDLEAEFYFTHLIVMFKSPRPAAMVLDRSQDFGKTWKPYKYFATNCSATFGLEDDVVKKGAICTPKYSSPFPCTGGEVIFKALSPPYDTENPYSAKVQEQLKITNLRVQLLKRQSYPCQRNDLNEEPQHFTHYAIYDFIVKGSCFCNGHADQCIPVHGFRPVKAPGTFHMVHGKCMCKHNTAGSHCQHCAPLYNDRPWEAADGKTGAPNECRARKCNGHADTCHFDVNVWEASGSRSGGVCDDCQHNTEGQYCQRCKPGFYRDLRRPFSAPDACKPCSCHPVGSAVLPANSVTFCDPSNGDCPCKPGVAGRRCDRCMVGYWGFGDYGCRPCDCAGSCDPITGDCISSHTDIDWCHEVPDFRPVHNKSEPAWEWEDAQGFSALLHSGKCECKEQTLGKAKAFCGMKYSYVLKIKILSAHDKGTHVEVNVKIKKVLKSTKLKIFRGKRTLYPESWTDRGCTCPILNPGLEYLAAGHEDIRTGKLIVNMKSFVQHWKPSLGRKVMDILKESAS

SEQ ID NO: 149 - DNA, 1791 bp, Homo sapiens
  CDS (1)..(1791)
aaagcctgcaaccctcggatgggaaatttggctttggggcgaaaactctgggcagacaccacctgcggtcagaatgctaccgaactgtactgcttctacagtgagaacacggatctgacttgtcggcagcccaaatgtgacaagtgcaatgctgcctatcctcacctggctcacctgccatctgccatggcagactcatccttccggtttcctcgcacatggtggcagtctgcggaggatgtgcacagagaaaagatccagttagacctggaagctgaattctacttcactcacctaattgtgatgttcaagtcccccaggccggctgccatggtgctggaccgctcccaggactttgggaaaacatggaagccttataagtactttgcgactaactgctccgctacatttggcctggaagatgatgttgtcaagaagggcgctatttgtactcctaaatactccagtccttttccatgcactggaggagaggttattttcaaagctttgtcaccaccatacgatacagagaacccttacagtgccaaagttcaggagcagctgaagatcaccaaccttcgcgtgcagctgctgaaacgacagtcttatccctgtcagagaaatgacctgaacgaagagcctcaacattttacacactatgcgatctatgatttcattgtcaagggcagctgcttctgcaatggccacgccgatcaatgcatacctgttcatggcttcagacctgtcaaggccccaggaacattccacatggtccatgggaagtgtatgtgtaagcacaacacagcaggcagccactgccagcactgtgccccgttatacaatgaccggccatgggaggcagctgatggcaaaacgggggctcccaacgagtgcagaacctgcaagtgtaatgggcatgctgatacctgtcacttcgacgttaatgtgtgggaggcatcagggaatcgtagtggtggtgtctgtgatgactgtcagcacaacacagaaggacagtattgccagaggtgcaagccaggcttctatcgtgacctgcggagacccttctcagctccagatgcttgcaaaccgtgttcctgccatccagtaggatcagctgtccttcctgccaactcagtgaccttctgcgaccccagcaatggtgactgcccttgcaagcctggggtggcagggcgacgttgtgacaggtgcatggtgggatactggggcttcggagactatggctgtcgaccatgtgactgtgcggggagctgtgaccctatcaccggagactgcatcagcagccacacagacatagactggtatcatgaagttcctgacttccgtcccgtgcacaataagagcgaaccagcctgggagtgggaggatgcgcaggggttttctgcacttctacactcaggtaaatgcgaatgtaaggaacagacattaggaaaggccaaggcattctgtggaatgaaatattcatatgtgctaaaaataaagattttatcagctcatgataaaggtactcatgttgaggtcaatgtgaagattaaaaaggtcttaaaatctaccaaactgaagattttccgaggaaagcgaacattatatccagaatcatggacggacagaggatgcacttgtccaatcctcaatcctggtttggaataccttgcagcaggacatgaggatataagaacaggcaaactaattgtgaatatgaaaagctttgtccagcactggaaaccttctcttggaagaaaagtcatggatattttaaaagagagtgcaagt

SEQ ID NO: 150 - protein, 597 aa, Homo sapiens
KACNPRMGNLALGRKLWADTTCGQNATELYCFYSENTDLTCRQPKCDKCNAAYPHLAHLPSAMADSSFRFPRTWWQSAEDVHREKIQLDLEAEFYFTHLIVMFKSPRPAAMVLDRSQDFGKTWKPYKYFATNCSATFGLEDDVVKKGAICTPKYSSPFPCTGGEVIFKALSPPYDTENPYSAKVQEQLKITNLRVQLLKRQSYPCQRNDLNEEPQHFTHYAIYDFIVKGSCFCNGHADQCIPVHGFRPVKAPGTFHMVHGKCMCKHNTAGSHCQHCAPLYNDRPWEAADGKTGAPNECRTCKCNGHADTCHFDVNVWEASGNRSGGVCDDCQHNTEGQYCQRCKPGFYRDLRRPFSAPDACKPCSCHPVGSAVLPANSVTFCDPSNGDCPCKPGVAGRRCDRCMVGYWGFGDYGCRPCDCAGSCDPITGDCISSHTDIDWYHEVPDFRPVHNKSEPAWEWEDAQGFSALLHSGKCECKEQTLGKAKAFCGMKYSYVLKIKILSAHDKGTHVEVNVKIKKVLKSTKLKIFRGKRTLYPESWTDRGCTCPILNPGLEYLAAGHEDIRTGKLIVNMKSFVQHWKPSLGRKVMDILKESAS

SEQ ID NO: 151 - DNA, 1791 bp, Homo sapiens
  CDS (1)..(1791)
aaagcctgcaaccctcggatgggaaatttggctttggggcgaaaactctgggcagacaccacctgcggtcagaatgctaccgaactgtactgcttctacagtgagaacacggatctgacttgtcggcagcccaaatgtgacaagtgcaatgctgcctatcctcacctggctcacctgccatctgccatggcagactcatccttccggtttcctcgcacatggtggcagtctgcggaggatgtgcacagagaaaagatccagttagacctggaagctgaattctacttcactcacctaattgtgatgttcaagtcccccaggccggctgccatggtgctggaccgctcccaggactttgggaaaacatggaagccttataagtactttgcgactaactgctccgctacatttggcctggaagatgatgttgtcaagaagggcgctatttgtactcctaaatactccagtccttttccatgcactggaggagaggttattttcaaagctttgtcaccaccatacgatacagagaacccttacagtgccaaagttcaggagcagctgaagatcaccaaccttcgcgtgcagctgctgaaacgacagtcttatccctgtcagagaaatgacctgaacgaagagcctcaacattttacacactatgcgatctatgatttcattgtcaagggcagctgcttctgcaatggccacgccgatcaatgcatacctgttcatggcttcagacctgtcaaggccccaggaacattccacatggtccatgggaagtgtatgtgtaagcacaacacagcaggcagccactgccagcactgtgccccgttatacaatgaccggccatgggaggcagctgatggcaaaacgggggctcccaacgagtgcagaacctgcaagtgtaatgggcatgctgatacctgtcacttcgacgttaatgtgtgggaggcatcagggagtcgtagtggtggtgtctgtgatgactgtcagcacaacacagaaggacagtattgccagaggtgcaagccaggcttctatcgtgacctgcggagacccttctcagctccagatgcttgcaaaccgtgttcctgccatccagtaggatcagctgtccttcctgccaactcagtgaccttctgcgaccccagcaatggtgactgcccttgcaagcctggggtggcagggcgacgttgtgacaggtgcatggtgggatactggggcttcggagactatggctgtcgaccatgtgactgtgcggggagctgtgaccctatcaccggagactgcatcagcagccacacagacatagactggtgtcatgaagttcctgacttccgtcccgtgcacaataagagcgaaccagcctgggagtgggaggatgcgcaggggttttctgcacttctacactcaggtaaatgcgaatgtaaggaacagacattaggaaaggccaaggcattctgtggaatgaaatattcatatgtgctaaaaataaagattttatcagctcatgataaaggtactcatgttgaggtcaatgtgaagattaaaaaggtcttaaaatctaccaaactgaagattttccgaggaaagcgaacattatatccagaatcatggacggacagaggatgcacttgtccaatcctcaatcctggtttggaataccttgcagcaggacatgaggatataagaacaggcaaactaattgtgaatatgaaaagctttgtccagcactggaaaccttctcttggaagaaaagtcatggatattttaaaagagagtgcaagt

SEQ ID NO: 152 - protein, 597 aa, Homo sapiens
KACNPRMGNLALGRKLWADTTCGQNATELYCFYSENTDLTCRQPKCDKCNAAYPHLAHLPSAMADSSFRFPRTWWQSAEDVHREKIQLDLEAEFYFTHLIVMFKSPRPAAMVLDRSQDFGKTWKPYKYFATNCSATFGLEDDVVKKGAICTPKYSSPFPCTGGEVIFKALSPPYDTENPYSAKVQEQLKITNLRVQLLKRQSYPCQRNDLNEEPQHFTHYAIYDFIVKGSCFCNGHADQCIPVHGFRPVKAPGTFHMVHGKCMCKHNTAGSHCQHCAPLYNDRPWEAADGKTGAPNECRTCKCNGHADTCHFDVNVWEASGSRSGGVCDDCQHNTEGQYCQRCKPGFYRDLRRPFSAPDACKPCSCHPVGSAVLPANSVTFCDPSNGDCPCKPGVAGRRCDRCMVGYWGFGDYGCRPCDCAGSCDPITGDCISSHTDIDWCHEVPDFRPVHNKSEPAWEWEDAQGFSALLHSGKCECKEQTLGKAKAFCGMKYSYVLKIKILSAHDKGTHVEVNVKIKKVLKSTKLKIFRGKRTLYPESWTDRGCTCPILNPGLEYLAAGHEDIRTGKLIVNMKSFVQHWKPSLGRKVMDILKESAS

SEQ ID NO: 153 - DNA, 1791 bp, Homo sapiens
  CDS (1)..(1791)
aaagcctgcaaccctcggatgggaaatttggctttggggcgaaaactctgggcagacaccacctgcggtcagaatgctaccgaactgtactgcttctacagtgagaacacggatctgacttgtcggcagcccaaatgtgacaagtgcaatgctgcctatcctcacctggctcacctgccatctgccatggcagactcatccttccggtttcctcgcacatggtggcagtctgcggaggatgtgcacagagaaaagatccagttagacctggaagctgaattctacttcactcacctaattgtgatgttcaagtcccccaggccggctgccatggtgctggaccgctcccaggactttgggaaaacatggaagccttataagtactttgcgactaactgctccgctacatttggcctggaagatgatgttgtcaagaagggcgctatttgtactcctaaatactccagtccttttccatgcactggaggagaggttattttcaaagctttgtcaccaccatacgatacagagaacccttacagtgccaaagttcaggagcagctgaagatcaccaaccttcgcgtgcagctgctgaaacgacagtcttatccctgtcagagaaatgacctgaacgaagagcctcaacattttacacactatgcgatctatgatttcattgtcaagggcagctgcttctgcaatggccacgccgatcaatgcatacctgttcatggcttcagacctgtcaaggccccaggaacattccacatggtccatgggaagtgtatgtgtaagcacaacacagcaggcagccactgccagcactgtgccccgttatacaatgaccggccatgggaggcagctgatggcaaaacgggggctcccaacgagtgcagaacccgcaagtgtaatgggcatgctgatacctgtcacttcgacgttaatgtgtgggaggcatcagggaatcgtagtggtggtgtctgtgatgactgtcagcacaacacagaaggacagtattgccagaggtgcaagccaggcttctatcgtgacctgcggagacccttctcagctccagatgcttgcaaaccgtgttcctgccatccagtaggatcagctgtccttcctgccaactcagtgaccttctgcgaccccagcaatggtgactgcccttgcaagcctggggtggcagggcgacgttgtgacaggtgcatggtgggatactggggcttcggagactatggctgtcgaccatgtgactgtgcggggagctgtgaccctatcaccggagactgcatcagcagccacacagacatagactggtgtcatgaagttcctgacttccgtcccgtgcacaataagagcgaaccagcctgggagtgggaggatgcgcaggggttttctgcacttctacactcaggtaaatgcgaatgtaaggaacagacattaggaaaggccaaggcattctgtggaatgaaatattcatatgtgctaaaaataaagattttatcagctcatgataaaggtactcatgttgaggtcaatgtgaagattaaaaaggtcttaaaatctaccaaactgaagattttccgaggaaagcgaacattatatccagaatcatggacggacagaggatgcacttgtccaatcctcaatcctggtttggaataccttgcagcaggacatgaggatataagaacaggcaaactaattgtgaatatgaaaagctttgtccagcactggaaaccttctcttggaagaaaagtcatggatattttaaaagagagtgcaagt

SEQ ID NO: 154 - protein, 597 aa, Homo sapiens
KACNPRMGNLALGRKLWADTTCGQNATELYCFYSENTDLTCRQPKCDKCNAAYPHLAHLPSAMADSSFRFPRTWWQSAEDVHREKIQLDLEAEFYFTHLIVMFKSPRPAAMVLDRSQDFGKTWKPYKYFATNCSATFGLEDDVVKKGAICTPKYSSPFPCTGGEVIFKALSPPYDTENPYSAKVQEQLKITNLRVQLLKRQSYPCQRNDLNEEPQHFTHYAIYDFIVKGSCFCNGHADQCIPVHGFRPVKAPGTFHMVHGKCMCKHNTAGSHCQHCAPLYNDRPWEAADGKTGAPNECRTRKCNGHADTCHFDVNVWEASGNRSGGVCDDCQHNTEGQYCQRCKPGFYRDLRRPFSAPDACKPCSCHPVGSAVLPANSVTFCDPSNGDCPCKPGVAGRRCDRCMVGYWGFGDYGCRPCDCAGSCDPITGDCISSHTDIDWCHEVPDFRPVHNKSEPAWEWEDAQGFSALLHSGKCECKEQTLGKAKAFCGMKYSYVLKIKILSAHDKGTHVEVNVKIKKVLKSTKLKIFRGKRTLYPESWTDRGCTCPILNPGLEYLAAGHEDIRTGKLIVNMKSFVQHWKPSLGRKVMDILKESAS

SEQ ID NO: 155 - DNA, 1791 bp, Homo sapiens
  CDS (1)..(1791)
aaagcctgcaaccctcggatgggaaatttggctttggggcgaaaactctgggcagacaccacctgcggtcagaatgctaccgaactgtactgcttctacagtgagaacacggatctgacttgtcggcagcccaaatgtgacaagtgcaatgctgcctatcctcacctggctcacctgccatctgccatggcagactcatccttccggtttcctcgcacatggtggcagtctgcggaggatgtgcacagagaaaagatccagttagacctggaagctgaattctacttcactcacctaattgtgatgttcaagtcccccaggccggctgccatggtgctggaccgctcccaggactttgggaaaacatggaagccttataagtactttgcgactaactgctccgctacatttggcctggaagatgatgttgtcaagaagggcgctatttgtactcctaaatactccagtccttttccatgcactggaggagaggttattttcaaagctttgtcaccaccatacgatacagagaacccttacagtgccaaagttcaggagcagctgaagatcaccaaccttcgcgtgcagctgctgaaacgacagtcttatccctgtcagagaaatgacctgaacgaagagcctcaacattttacacactatgcgatctatgatttcattgtcaagggcagctgcttctgcaatggccacgccgatcaatgcatacctgttcatggcttcagacctgtcaaggccccaggaacattccacatggtccatgggaagtgtatgtgtaagcacaacacagcaggcagccactgccagcactgtgccccgttatacaatgaccggccatgggaggcagctgatggcaaaacgggggctcccaacgagtgcagagcctgcaagtgtaatgggcatgctgatacctgtcacttcgacgttaatgtgtgggaggcatcagggaatcgtagtggtggtgtctgtgatgactgtcagcacaacacagaaggacagtattgccagaggtgcaagccaggcttctatcgtgacctgcggagacccttctcagctccagatgcttgcaaaccgtgttcctgccatccagtaggatcagctgtccttcctgccaactcagtgaccttctgcgaccccagcaatggtgactgcccttgcaagcctggggtggcagggcgacgttgtgacaggtgcatggtgggatactggggcttcggagactatggctgtcgaccatgtgactgtgcggggagctgtgaccctatcaccggagactgcatcagcagccacacagacatagactggtatcatgaagttcctgacttccgtcccgtgcacaataagagcgaaccagcctgggagtgggaggatgcgcaggggttttctgcacttctacactcaggtaaatgcgaatgtaaggaacagacattaggaaaggccaaggcattctgtggaatgaaatattcatatgtgctaaaaataaagattttatcagctcatgataaaggtactcatgttgaggtcaatgtgaagattaaaaaggtcttaaaatctaccaaactgaagattttccgaggaaagcgaacattatatccagaatcatggacggacagaggatgcacttgtccaatcctcaatcctggtttggaataccttgcagcaggacatgaggatataagaacaggcaaactaattgtgaatatgaaaagctttgtccagcactggaaaccttctcttggaagaaaagtcatggatattttaaaagagagtgcaagt

SEQ ID NO: 156 - protein, 597 aa, Homo sapiens
KACNPRMGNLALGRKLWADTTCGQNATELYCFYSENTDLTCRQPKCDKCNAAYPHLAHLPSAMADSSFRFPRTWWQSAEDVHREKIQLDLEAEFYFTHLIVMFKSPRPAAMVLDRSQDFGKTWKPYKYFATNCSATFGLEDDVVKKGAICTPKYSSPFPCTGGEVIFKALSPPYDTENPYSAKVQEQLKITNLRVQLLKRQSYPCQRNDLNEEPQHFTHYAIYDFIVKGSCFCNGHADQCIPVHGFRPVKAPGTFHMVHGKCMCKHNTAGSHCQHCAPLYNDRPWEAADGKTGAPNECRACKCNGHADTCHFDVNVWEASGNRSGGVCDDCQHNTEGQYCQRCKPGFYRDLRRPFSAPDACKPCSCHPVGSAVLPANSVTFCDPSNGDCPCKPGVAGRRCDRCMVGYWGFGDYGCRPCDCAGSCDPITGDCISSHTDIDWYHEVPDFRPVHNKSEPAWEWEDAQGFSALLHSGKCECKEQTLGKAKAFCGMKYSYVLKIKILSAHDKGTHVEVNVKIKKVLKSTKLKIFRGKRTLYPESWTDRGCTCPILNPGLEYLAAGHEDIRTGKLIVNMKSFVQHWKPSLGRKVMDILKESAS

SEQ ID NO: 157 - DNA, 1791 bp, Homo sapiens
  CDS (1)..(1791)
aaagcctgcaaccctcggatgggaaatttggctttggggcgaaaactctgggcagacaccacctgcggtcagaatgctaccgaactgtactgcttctacagtgagaacacggatctgacttgtcggcagcccaaatgtgacaagtgcaatgctgcctatcctcacctggctcacctgccatctgccatggcagactcatccttccggtttcctcgcacatggtggcagtctgcggaggatgtgcacagagaaaagatccagttagacctggaagctgaattctacttcactcacctaattgtgatgttcaagtcccccaggccggctgccatggtgctggaccgctcccaggactttgggaaaacatggaagccttataagtactttgcgactaactgctccgctacatttggcctggaagatgatgttgtcaagaagggcgctatttgtactcctaaatactccagtccttttccatgcactggaggagaggttattttcaaagctttgtcaccaccatacgatacagagaacccttacagtgccaaagttcaggagcagctgaagatcaccaaccttcgcgtgcagctgctgaaacgacagtcttatccctgtcagagaaatgacctgaacgaagagcctcaacattttacacactatgcgatctatgatttcattgtcaagggcagctgcttctgcaatggccacgccgatcaatgcatacctgttcatggcttcagacctgtcaaggccccaggaacattccacatggtccatgggaagtgtatgtgtaagcacaacacagcaggcagccactgccagcactgtgccccgttatacaatgaccggccatgggaggcagctgatggcaaaacgggggctcccaacgagtgcagagcctgcaagtgtaatgggcatgctgatacctgtcacttcgacgttaatgtgtgggaggcatcagggagtcgtagtggtggtgtctgtgatgactgtcagcacaacacagaaggacagtattgccagaggtgcaagccaggcttctatcgtgacctgcggagacccttctcagctccagatgcttgcaaaccgtgttcctgccatccagtaggatcagctgtccttcctgccaactcagtgaccttctgcgaccccagcaatggtgactgcccttgcaagcctggggtggcagggcgacgttgtgacaggtgcatggtgggatactggggcttcggagactatggctgtcgaccatgtgactgtgcggggagctgtgaccctatcaccggagactgcatcagcagccacacagacatagactggtgtcatgaagttcctgacttccgtcccgtgcacaataagagcgaaccagcctgggagtgggaggatgcgcaggggttttctgcacttctacactcaggtaaatgcgaatgtaaggaacagacattaggaaaggccaaggcattctgtggaatgaaatattcatatgtgctaaaaataaagattttatcagctcatgataaaggtactcatgttgaggtcaatgtgaagattaaaaaggtcttaaaatctaccaaactgaagattttccgaggaaagcgaacattatatccagaatcatggacggacagaggatgcacttgtccaatcctcaatcctggtttggaataccttgcagcaggacatgaggatataagaacaggcaaactaattgtgaatatgaaaagctttgtccagcactggaaaccttctcttggaagaaaagtcatggatattttaaaagagagtgcaagt

SEQ ID NO: 158 - protein, 597 aa, Homo sapiens
KACNPRMGNLALGRKLWADTTCGQNATELYCFYSENTDLTCRQPKCDKCNAAYPHLAHLPSAMADSSFRFPRTWWQSAEDVHREKIQLDLEAEFYFTHLIVMFKSPRPAAMVLDRSQDFGKTWKPYKYFATNCSATFGLEDDVVKKGAICTPKYSSPFPCTGGEVIFKALSPPYDTENPYSAKVQEQLKITNLRVQLLKRQSYPCQRNDLNEEPQHFTHYAIYDFIVKGSCFCNGHADQCIPVHGFRPVKAPGTFHMVHGKCMCKHNTAGSHCQHCAPLYNDRPWEAADGKTGAPNECRACKCNGHADTCHFDVNVWEASGSRSGGVCDDCQHNTEGQYCQRCKPGFYRDLRRPFSAPDACKPCSCHPVGSAVLPANSVTFCDPSNGDCPCKPGVAGRRCDRCMVGYWGFGDYGCRPCDCAGSCDPITGDCISSHTDIDWCHEVPDFRPVHNKSEPAWEWEDAQGFSALLHSGKCECKEQTLGKAKAFCGMKYSYVLKIKILSAHDKGTHVEVNVKIKKVLKSTKLKIFRGKRTLYPESWTDRGCTCPILNPGLEYLAAGHEDIRTGKLIVNMKSFVQHWKPSLGRKVMDILKESAS

SEQ ID NO: 159 - DNA, 1791 bp, Homo sapiens
  CDS (1)..(1791)
aaagcctgcaaccctcggatgggaaatttggctttggggcgaaaactctgggcagacaccacctgcggtcagaatgctaccgaactgtactgcttctacagtgagaacacggatctgacttgtcggcagcccaaatgtgacaagtgcaatgctgcctatcctcacctggctcacctgccatctgccatggcagactcatccttccggtttcctcgcacatggtggcagtctgcggaggatgtgcacagagaaaagatccagttagacctggaagctgaattctacttcactcacctaattgtgatgttcaagtcccccaggccggctgccatggtgctggaccgctcccaggactttgggaaaacatggaagccttataagtactttgcgactaactgctccgctacatttggcctggaagatgatgttgtcaagaagggcgctatttgtactcctaaatactccagtccttttccatgcactggaggagaggttattttcaaagctttgtcaccaccatacgatacagagaacccttacagtgccaaagttcaggagcagctgaagatcaccaaccttcgcgtgcagctgctgaaacgacagtcttatccctgtcagagaaatgacctgaacgaagagcctcaacattttacacactatgcgatctatgatttcattgtcaagggcagctgcttctgcaatggccacgccgatcaatgcatacctgttcatggcttcagacctgtcaaggccccaggaacattccacatggtccatgggaagtgtatgtgtaagcacaacacagcaggcagccactgccagcactgtgccccgttatacaatgaccggccatgggaggcagctgatggcaaaacgggggctcccaacgagtgcagagcccgcaagtgtaatgggcatgctgatacctgtcacttcgacgttaatgtgtgggaggcatcagggaatcgtagtggtggtgtctgtgatgactgtcagcacaacacagaaggacagtattgccagaggtgcaagccaggcttctatcgtgacctgcggagacccttctcagctccagatgcttgcaaaccgtgttcctgccatccagtaggatcagctgtccttcctgccaactcagtgaccttctgcgaccccagcaatggtgactgcccttgcaagcctggggtggcagggcgacgttgtgacaggtgcatggtgggatactggggcttcggagactatggctgtcgaccatgtgactgtgcggggagctgtgaccctatcaccggagactgcatcagcagccacacagacatagactggtgtcatgaagttcctgacttccgtcccgtgcacaataagagcgaaccagcctgggagtgggaggatgcgcaggggttttctgcacttctacactcaggtaaatgcgaatgtaaggaacagacattaggaaaggccaaggcattctgtggaatgaaatattcatatgtgctaaaaataaagattttatcagctcatgataaaggtactcatgttgaggtcaatgtgaagattaaaaaggtcttaaaatctaccaaactgaagattttccgaggaaagcgaacattatatccagaatcatggacggacagaggatgcacttgtccaatcctcaatcctggtttggaataccttgcagcaggacatgaggatataagaacaggcaaactaattgtgaatatgaaaagctttgtccagcactggaaaccttctcttggaagaaaagtcatggatattttaaaagagagtgcaagt

SEQ ID NO: 160 - protein, 597 aa, Homo sapiens
KACNPRMGNLALGRKLWADTTCGQNATELYCFYSENTDLTCRQPKCDKCNAAYPHLAHLPSAMADSSFRFPRTWWQSAEDVHREKIQLDLEAEFYFTHLIVMFKSPRPAAMVLDRSQDFGKTWKPYKYFATNCSATFGLEDDVVKKGAICTPKYSSPFPCTGGEVIFKALSPPYDTENPYSAKVQEQLKITNLRVQLLKRQSYPCQRNDLNEEPQHFTHYAIYDFIVKGSCFCNGHADQCIPVHGFRPVKAPGTFHMVHGKCMCKHNTAGSHCQHCAPLYNDRPWEAADGKTGAPNECRARKCNGHADTCHFDVNVWEASGNRSGGVCDDCQHNTEGQYCQRCKPGFYRDLRRPFSAPDACKPCSCHPVGSAVLPANSVTFCDPSNGDCPCKPGVAGRRCDRCMVGYWGFGDYGCRPCDCAGSCDPITGDCISSHTDIDWCHEVPDFRPVHNKSEPAWEWEDAQGFSALLHSGKCECKEQTLGKAKAFCGMKYSYVLKIKILSAHDKGTHVEVNVKIKKVLKSTKLKIFRGKRTLYPESWTDRGCTCPILNPGLEYLAAGHEDIRTGKLIVNMKSFVQHWKPSLGRKVMDILKESAS

SEQ ID NO: 161 - DNA, 1791 bp, Homo sapiens
  CDS (1)..(1791)
aaagcctgcaaccctcggatgggaaatttggctttggggcgaaaactctgggcagacaccacctgcggtcagaatgctaccgaactgtactgcttctacagtgagaacacggatctgacttgtcggcagcccaaatgtgacaagtgcaatgctgcctatcctcacctggctcacctgccatctgccatggcagactcatccttccggtttcctcgcacatggtggcagtctgcggaggatgtgcacagagaaaagatccagttagacctggaagctgaattctacttcactcacctaattgtgatgttcaagtcccccaggccggctgccatggtgctggaccgctcccaggactttgggaaaacatggaagccttataagtactttgcgactaactgctccgctacatttggcctggaagatgatgttgtcaagaagggcgctatttgtactcctaaatactccagtccttttccatgcactggaggagaggttattttcaaagctttgtcaccaccatacgatacagagaacccttacagtgccaaagttcaggagcagctgaagatcaccaaccttcgcgtgcagctgctgaaacgacagtcttatccctgtcagagaaatgacctgaacgaagagcctcaacattttacacactatgcgatctatgatttcattgtcaagggcagctgcttctgcaatggccacgccgatcaatgcatacctgttcatggcttcagacctgtcaaggccccaggaacattccacatggtccatgggaagtgtatgtgtaagcacaacacagcaggcagccactgccagcactgtgccccgttatacaatgaccggccatgggaggcagctgatggcaaaacgggggctcccaacgagtgcagaacctgcaagtgtaatgggcatgctgatacctgtcacttcgacgttaatgtgtgggaggcatcagggaatcgtagtggtggtgtctgtgatgactgtcagcacaacacagaaggacagtattgccagaggtgcaagccaggcttctatcgtgacctgcggagacccttctcagctccagatgcttgcaaaccgtgttcctgccatccagtaggatcagctgtccttcctgccaactcagtgaccttctgcgaccccagcaatggtgactgcccttgcaagcctggggtggcagggcgacgttgtgacaggtgcatggtgggatactggggcttcggagactatggctgtcgaccatgtgactgtgcggggagctgtgaccctatcaccggagactgcatcagcagccacacagacatagactggtgtcatgaagttcctgacttccgtcccgtgcacaataagagcgaaccagcctgggagtgggaggatgcgcaggggttttctgcacttctacactcaggtaaatgcgaatgtaaggaacagacattaggaaaggccaaggcattctgtggaatgaaatattcatatgtgctaaaaataaagattttatcagctcatgataaaggtactcatgttgaggtcaatgtgaagattaaaaaggtcttaaaatctaccaaactgaagattttccgaggaaagcgaacattatatccagaatcatggacggacagaggatgcacttgtccaatcctcaatcctggtttggaataccttgcagcaggacatgaggatataagaacaggcaaactaattgtgaatatgaaaagctttgtccagcactggaaaccttctcttggaagaaaagtcatggatattttaaaagagagtgcaagt

SEQ ID NO: 162 - protein, 597 aa, Homo sapiens
KACNPRMGNLALGRKLWADTTCGQNATELYCFYSENTDLTCRQPKCDKCNAAYPHLAHLPSAMADSSFRFPRTWWQSAEDVHREKIQLDLEAEFYFTHLIVMFKSPRPAAMVLDRSQDFGKTWKPYKYFATNCSATFGLEDDVVKKGAICTPKYSSPFPCTGGEVIFKALSPPYDTENPYSAKVQEQLKITNLRVQLLKRQSYPCQRNDLNEEPQHFTHYAIYDFIVKGSCFCNGHADQCIPVHGFRPVKAPGTFHMVHGKCMCKHNTAGSHCQHCAPLYNDRPWEAADGKTGAPNECRTCKCNGHADTCHFDVNVWEASGNRSGGVCDDCQHNTEGQYCQRCKPGFYRDLRRPFSAPDACKPCSCHPVGSAVLPANSVTFCDPSNGDCPCKPGVAGRRCDRCMVGYWGFGDYGCRPCDCAGSCDPITGDCISSHTDIDWCHEVPDFRPVHNKSEPAWEWEDAQGFSALLHSGKCECKEQTLGKAKAFCGMKYSYVLKIKILSAHDKGTHVEVNVKIKKVLKSTKLKIFRGKRTLYPESWTDRGCTCPILNPGLEYLAAGHEDIRTGKLIVNMKSFVQHWKPSLGRKVMDILKESAS

SEQ ID NO: 163 - DNA, 1791 bp, Homo sapiens
  CDS (1)..(1791)
aaagcctgcaaccctcggatgggaaatttggctttggggcgaaaactctgggcagacaccacctgcggtcagaatgctaccgaactgtactgcttctacagtgagaacacggatctgacttgtcggcagcccaaatgtgacaagtgcaatgctgcctatcctcacctggctcacctgccatctgccatggcagactcatccttccggtttcctcgcacatggtggcagtctgcggaggatgtgcacagagaaaagatccagttagacctggaagctgaattctacttcactcacctaattgtgatgttcaagtcccccaggccggctgccatggtgctggaccgctcccaggactttgggaaaacatggaagccttataagtactttgcgactaactgctccgctacatttggcctggaagatgatgttgtcaagaagggcgctatttgtactcctaaatactccagtccttttccatgcactggaggagaggttattttcaaagctttgtcaccaccatacgatacagagaacccttacagtgccaaagttcaggagcagctgaagatcaccaaccttcgcgtgcagctgctgaaacgacagtcttatccctgtcagagaaatgacctgaacgaagagcctcaacattttacacactatgcgatctatgatttcattgtcaagggcagctgcttctgcaatggccacgccgatcaatgcatacctgttcatggcttcagacctgtcaaggccccaggaacattccacatggtccatgggaagtgtatgtgtaagcacaacacagcaggcagccactgccagcactgtgccccgttatacaatgaccggccatgggaggcagctgatggcaaaacgggggctcccaacgagtgcagagcctgcaagtgtaatgggcatgctgatacctgtcacttcgacgttaatgtgtgggaggcatcagggaatcgtagtggtggtgtctgtgatgactgtcagcacaacacagaaggacagtattgccagaggtgcaagccaggcttctatcgtgacctgcggagacccttctcagctccagatgcttgcaaaccgtgttcctgccatccagtaggatcagctgtccttcctgccaactcagtgaccttctgcgaccccagcaatggtgactgcccttgcaagcctggggtggcagggcgacgttgtgacaggtgcatggtgggatactggggcttcggagactatggctgtcgaccatgtgactgtgcggggagctgtgaccctatcaccggagactgcatcagcagccacacagacatagactggtgtcatgaagttcctgacttccgtcccgtgcacaataagagcgaaccagcctgggagtgggaggatgcgcaggggttttctgcacttctacactcaggtaaatgcgaatgtaaggaacagacattaggaaaggccaaggcattctgtggaatgaaatattcatatgtgctaaaaataaagattttatcagctcatgataaaggtactcatgttgaggtcaatgtgaagattaaaaaggtcttaaaatctaccaaactgaagattttccgaggaaagcgaacattatatccagaatcatggacggacagaggatgcacttgtccaatcctcaatcctggtttggaataccttgcagcaggacatgaggatataagaacaggcaaactaattgtgaatatgaaaagctttgtccagcactggaaaccttctcttggaagaaaagtcatggatattttaaaagagagtgcaagt

SEQ ID NO: 164 - protein, 597 aa, Homo sapiens
KACNPRMGNLALGRKLWADTTCGQNATELYCFYSENTDLTCRQPKCDKCNAAYPHLAHLPSAMADSSFRFPRTWWQSAEDVHREKIQLDLEAEFYFTHLIVMFKSPRPAAMVLDRSQDFGKTWKPYKYFATNCSATFGLEDDVVKKGAICTPKYSSPFPCTGGEVIFKALSPPYDTENPYSAKVQEQLKITNLRVQLLKRQSYPCQRNDLNEEPQHFTHYAIYDFIVKGSCFCNGHADQCIPVHGFRPVKAPGTFHMVHGKCMCKHNTAGSHCQHCAPLYNDRPWEAADGKTGAPNECRACKCNGHADTCHFDVNVWEASGNRSGGVCDDCQHNTEGQYCQRCKPGFYRDLRRPFSAPDACKPCSCHPVGSAVLPANSVTFCDPSNGDCPCKPGVAGRRCDRCMVGYWGFGDYGCRPCDCAGSCDPITGDCISSHTDIDWCHEVPDFRPVHNKSEPAWEWEDAQGFSALLHSGKCECKEQTLGKAKAFCGMKYSYVLKIKILSAHDKGTHVEVNVKIKKVLKSTKLKIFRGKRTLYPESWTDRGCTCPILNPGLEYLAAGHEDIRTGKLIVNMKSFVQHWKPSLGRKVMDILKESAS

SEQ ID NO: 165 - DNA, 1794 bp, Homo sapiens
  CDS (1)..(1794)
aaagcctgcaaccctcggatgggaaatttggctttggggcgaaaactctgggcagacaccacctgcggtcagaatgctaccgaactgtactgcttctacagtgagaacaaggatctgacttgtcggcagcccaaatgtgacaagtgcaatgctgcctatcctcacctggctcacctgccatctgccatggcagactcatccttccggtttcctcgcacatggtggcagtctgcggaggatgtgcacagagaaaagatccagttagacctggaagctgaattctacttcactcacctaattgtgatgttcaagtcccccaggccggctgccatggtgctggaccgctcccaggactttgggaaaacatggaagccttataagtactttgcgactaactgctccgctacatttggcctggaagatgatgttgtcaagaagggcgctatttgtacttctaaatactccagtccttttccatgcactggaggagaggttattttcaaagctttgtcaccaccacacgatacagagaacccttacagtgccaaagttcaggagcagctgaagatcaccaaccttcgcgtgcagctgctgaaacgacagtcttgtccctgtcagagaaatgacctgaacgaagagcctcaacattttacacactatgcgatctatgatttcattgtcaagggcagctgcttctgcaatggccacgccgatcaatgcatacctgttcatggcttcagacctgtcaaggccccaggaacattccacatggtccatgggaagtgtatgtgtaagcacaacacagcaggcagccactgccagcactgtgccccgttatacaatgaccggccatgggaggcagctgatggcaaaacgggggctcccaacgagtgcagaacctgcaagtgtaatgggcatgctgatacctgtcacttcgacgttaatgtgtgggaggcatcagggaatcgtagtggtggtgtctgtgatgactgtcagcacaacacagaaggacagtattgccagaggtgcaagccaggcttctatcgtgacctgcggagacccttctcagctccagatgcttgcaaaccgtgttcctgccatccagtaggatcagctgtccttcctgccaactcagtgaccttctgcgaccccagcaatggtgactgcccttgcaagcctggggtggcagggcgacgttgtgacaggtgcatggtgggatactggggcttcggagactatggctgtcgaccatgtgactgtgcggggagctgtgaccctatcaccggagactgcatcagcagccacacagacatagactggtgtcatgaagttcctgacttccgtcccgtgcacaataagagcgaaccagcctgggagtgggaggatgcgcaggggttttctgcacttctacactcaggtaaatgcgaatgtaaggaacagacattaggaaatgccaaggcattctgtggaatgaaatattcatatgtgctaaaaataaagattttatcagctcatgataaaggtactcatgttgaggtcaatgtgaagattaaaaaggtcttaaaatctaccaaactgaagattttccgaggaaagcgaacattatatccagaatcatggacggacagaggatgcacttgtccaatcctcaatcctggtttggaataccttgtagcaggacatgaggatataagaacaggcaaactaattgtgaatatgaaaagctttgtccagcactggaaaccttctcttggaagaaaagtcatggatattttaaaaagagagtgcaagtag

SEQ ID NO: 166 - protein, 597 aa, Homo sapiens
KACNPRMGNLALGRKLWADTTCGQNATELYCFYSENKDLTCRQPKCDKCNAAYPHLAHLPSAMADSSFRFPRTWWQSAEDVHREKIQLDLEAEFYFTHLIVMFKSPRPAAMVLDRSQDFGKTWKPYKYFATNCSATFGLEDDVVKKGAICTSKYSSPFPCTGGEVIFKALSPPHDTENPYSAKVQEQLKITNLRVQLLKRQSCPCQRNDLNEEPQHFTHYAIYDFIVKGSCFCNGHADQCIPVHGFRPVKAPGTFHMVHGKCMCKHNTAGSHCQHCAPLYNDRPWEAADGKTGAPNECRTCKCNGHADTCHFDVNVWEASGNRSGGVCDDCQHNTEGQYCQRCKPGFYRDLRRPFSAPDACKPCSCHPVGSAVLPANSVTFCDPSNGDCPCKPGVAGRRCDRCMVGYWGFGDYGCRPCDCAGSCDPITGDCISSHTDIDWCHEVPDFRPVHNKSEPAWEWEDAQGFSALLHSGKCECKEQTLGNAKAFCGMKYSYVLKIKILSAHDKGTHVEVNVKIKKVLKSTKLKIFRGKRTLYPESWTDRGCTCPILNPGLEYLVAGHEDIRTGKLIVNMKSFVQHWKPSLGRKVMDILKRECK

SEQ ID NO: 167 - DNA, 1794 bp, Homo sapiens
  CDS (1)..(1794)
aaagcctgcaaccctcggatgggaaatttggctttggggcgaaaactctgggcagacaccacctgcggtcagaatgctaccgaactgtactgcttctacagtgagaacaaggatctgacttgtcggcagcccaaatgtgacaagtgcaatgctgcctatcctcacctggctcacctgccatctgccatggcagactcatccttccggtttcctcgcacatggtggcagtctgcggaggatgtgcacagagaaaagatccagttagacctggaagctgaattctacttcactcacctaattgtgatgttcaagtcccccaggccggctgccatggtgctggaccgctcccaggactttgggaaaacatggaagccttataagtactttgcgactaactgctccgctacatttggcctggaagatgatgttgtcaagaagggcgctatttgtacttctaaatactccagtccttttccatgcactggaggagaggttattttcaaagctttgtcaccaccacacgatacagagaacccttacagtgccaaagttcaggagcagctgaagatcaccaaccttcgcgtgcagctgctgaaacgacagtcttgtccctgtcagagaaatgacctgaacgaagagcctcaacattttacacactatgcgatctatgatttcattgtcaagggcagctgcttctgcaatggccacgccgatcaatgcatacctgttcatggcttcagacctgtcaaggccccaggaacattccacatggtccatgggaagtgtatgtgtaagcacaacacagcaggcagccactgccagcactgtgccccgttatacaatgaccggccatgggaggcagctgatggcaaaacgggggctcccaacgagtgcagagcccgcaagtgtaatgggcatgctgatacctgtcacttcgacgttaatgtgtgggaggcatcagggaatcgtagtggtggtgtctgtgatgactgtcagcacaacacagaaggacagtattgccagaggtgcaagccaggcttctatcgtgacctgcggagacccttctcagctccagatgcttgcaaaccgtgttcctgccatccagtaggatcagctgtccttcctgccaactcagtgaccttctgcgaccccagcaatggtgactgcccttgcaagcctggggtggcagggcgacgttgtgacaggtgcatggtgggatactggggcttcggagactatggctgtcgaccatgtgactgtgcggggagctgtgaccctatcaccggagactgcatcagcagccacacagacatagactggtgtcatgaagttcctgacttccgtcccgtgcacaataagagcgaaccagcctgggagtgggaggatgcgcaggggttttctgcacttctacactcaggtaaatgcgaatgtaaggaacagacattaggaaatgccaaggcattctgtggaatgaaatattcatatgtgctaaaaataaagattttatcagctcatgataaaggtactcatgttgaggtcaatgtgaagattaaaaaggtcttaaaatctaccaaactgaagattttccgaggaaagcgaacattatatccagaatcatggacggacagaggatgcacttgtccaatcctcaatcctggtttggaataccttgtagcaggacatgaggatataagaacaggcaaactaattgtgaatatgaaaagctttgtccagcactggaaaccttctcttggaagaaaagtcatggatattttaaaaagagagtgcaagtag

SEQ ID NO: 168 - protein, 597 aa, Homo sapiens
KACNPRMGNLALGRKLWADTTCGQNATELYCFYSENKDLTCRQPKCDKCNAAYPHLAHLPSAMADSSFRFPRTWWQSAEDVHREKIQLDLEAEFYFTHLIVMFKSPRPAAMVLDRSQDFGKTWKPYKYFATNCSATFGLEDDVVKKGAICTSKYSSPFPCTGGEVIFKALSPPHDTENPYSAKVQEQLKITNLRVQLLKRQSCPCQRNDLNEEPQHFTHYAIYDFIVKGSCFCNGHADQCIPVHGFRPVKAPGTFHMVHGKCMCKHNTAGSHCQHCAPLYNDRPWEAADGKTGAPNECRARKCNGHADTCHFDVNVWEASGNRSGGVCDDCQHNTEGQYCQRCKPGFYRDLRRPFSAPDACKPCSCHPVGSAVLPANSVTFCDPSNGDCPCKPGVAGRRCDRCMVGYWGFGDYGCRPCDCAGSCDPITGDCISSHTDIDWCHEVPDFRPVHNKSEPAWEWEDAQGFSALLHSGKCECKEQTLGNAKAFCGMKYSYVLKIKILSAHDKGTHVEVNVKIKKVLKSTKLKIFRGKRTLYPESWTDRGCTCPILNPGLEYLVAGHEDIRTGKLIVNMKSFVQHWKPSLGRKVMDILKRECK

SEQ ID NO: 169 - DNA, 1794 bp, Homo sapiens
  CDS (1)..(1794)
aaagcctgcaaccctcggatgggaaatttggctttggggcgaaaactctgggcagacaccacctgcggtcagaatgctaccgaactgtactgcttctacagtgagaacaaggatctgacttgtcggcagcccaaatgtgacaagtgcaatgctgcctatcctcacctggctcacctgccatctgccatggcagactcatccttccggtttcctcgcacatggtggcagtctgcggaggatgtgcacagagaaaagatccagttagacctggaagctgaattctacttcactcacctaattgtgatgttcaagtcccccaggccggctgccatggtgctggaccgctcccaggactttgggaaaacatggaagccttataagtactttgcgactaactgctccgctacatttggcctggaagatgatgttgtcaagaagggcgctatttgtacttctaaatactccagtccttttccatgcactggaggagaggttattttcaaagctttgtcaccaccacacgatacagagaacccttacagtgccaaagttcaggagcagctgaagatcaccaaccttcgcgtgcagctgctgaaacgacagtcttgtccctgtcagagaaatgacctgaacgaagagcctcaacattttacacactatgcgatctatgatttcattgtcaagggcagctgcttctgcaatggccacgccgatcaatgcatacctgttcatggcttcagacctgtcaaggccccaggaacattccacatggtccatgggaagtgtatgtgtaagcacaacacagcaggcagccactgccagcactgtgccccgttatacaatgaccggccatgggaggcagctgatggcaaaacgggggctcccaacgagtgcagagcctgcaagtgtaatgggcatgctgatacctgtcacttcgacgttaatgtgtgggaggcatcagggagtcgtagtggtggtgtctgtgatgactgtcagcacaacacagaaggacagtattgccagaggtgcaagccaggcttctatcgtgacctgcggagacccttctcagctccagatgcttgcaaaccgtgttcctgccatccagtaggatcagctgtccttcctgccaactcagtgaccttctgcgaccccagcaatggtgactgcccttgcaagcctggggtggcagggcgacgttgtgacaggtgcatggtgggatactggggcttcggagactatggctgtcgaccatgtgactgtgcggggagctgtgaccctatcaccggagactgcatcagcagccacacagacatagactggtgtcatgaagttcctgacttccgtcccgtgcacaataagagcgaaccagcctgggagtgggaggatgcgcaggggttttctgcacttctacactcaggtaaatgcgaatgtaaggaacagacattaggaaatgccaaggcattctgtggaatgaaatattcatatgtgctaaaaataaagattttatcagctcatgataaaggtactcatgttgaggtcaatgtgaagattaaaaaggtcttaaaatctaccaaactgaagattttccgaggaaagcgaacattatatccagaatcatggacggacagaggatgcacttgtccaatcctcaatcctggtttggaataccttgtagcaggacatgaggatataagaacaggcaaactaattgtgaatatgaaaagctttgtccagcactggaaaccttctcttggaagaaaagtcatggatattttaaaaagagagtgcaagtag

SEQ ID NO: 170 - protein, 597 aa, Homo sapiens
KACNPRMGNLALGRKLWADTTCGQNATELYCFYSENKDLTCRQPKCDKCNAAYPHLAHLPSAMADSSFRFPRTWWQSAEDVHREKIQLDLEAEFYFTHLIVMFKSPRPAAMVLDRSQDFGKTWKPYKYFATNCSATFGLEDDVVKKGAICTSKYSSPFPCTGGEVIFKALSPPHDTENPYSAKVQEQLKITNLRVQLLKRQSCPCQRNDLNEEPQHFTHYAIYDFIVKGSCFCNGHADQCIPVHGFRPVKAPGTFHMVHGKCMCKHNTAGSHCQHCAPLYNDRPWEAADGKTGAPNECRACKCNGHADTCHFDVNVWEASGSRSGGVCDDCQHNTEGQYCQRCKPGFYRDLRRPFSAPDACKPCSCHPVGSAVLPANSVTFCDPSNGDCPCKPGVAGRRCDRCMVGYWGFGDYGCRPCDCAGSCDPITGDCISSHTDIDWCHEVPDFRPVHNKSEPAWEWEDAQGFSALLHSGKCECKEQTLGNAKAFCGMKYSYVLKIKILSAHDKGTHVEVNVKIKKVLKSTKLKIFRGKRTLYPESWTDRGCTCPILNPGLEYLVAGHEDIRTGKLIVNMKSFVQHWKPSLGRKVMDILKRECK

SEQ ID NO: 171 - DNA, 1794 bp, Homo sapiens
  CDS (1)..(1794)
aaagcctgcaaccctcggatgggaaatttggctttggggcgaaaactctgggcagacaccacctgcggtcagaatgctaccgaactgtactgcttctacagtgagaacaaggatctgacttgtcggcagcccaaatgtgacaagtgcaatgctgcctatcctcacctggctcacctgccatctgccatggcagactcatccttccggtttcctcgcacatggtggcagtctgcggaggatgtgcacagagaaaagatccagttagacctggaagctgaattctacttcactcacctaattgtgatgttcaagtcccccaggccggctgccatggtgctggaccgctcccaggactttgggaaaacatggaagccttataagtactttgcgactaactgctccgctacatttggcctggaagatgatgttgtcaagaagggcgctatttgtacttctaaatactccagtccttttccatgcactggaggagaggttattttcaaagctttgtcaccaccacacgatacagagaacccttacagtgccaaagttcaggagcagctgaagatcaccaaccttcgcgtgcagctgctgaaacgacagtcttgtccctgtcagagaaatgacctgaacgaagagcctcaacattttacacactatgcgatctatgatttcattgtcaagggcagctgcttctgcaatggccacgccgatcaatgcatacctgttcatggcttcagacctgtcaaggccccaggaacattccacatggtccatgggaagtgtatgtgtaagcacaacacagcaggcagccactgccagcactgtgccccgttatacaatgaccggccatgggaggcagctgatggcaaaacgggggctcccaacgagtgcagagcctgcaagtgtaatgggcatgctgatacctgtcacttcgacgttaatgtgtgggaggcatcagggaatcgtagtggtggtgtctgtgatgactgtcagcacaacacagaaggacagtattgccagaggtgcaagccaggcttctatcgtgacctgcggagacccttctcagctccagatgcttgcaaaccgtgttcctgccatccagtaggatcagctgtccttcctgccaactcagtgaccttctgcgaccccagcaatggtgactgcccttgcaagcctggggtggcagggcgacgttgtgacaggtgcatggtgggatactggggcttcggagactatggctgtcgaccatgtgactgtgcggggagctgtgaccctatcaccggagactgcatcagcagccacacagacatagactggtatcatgaagttcctgacttccgtcccgtgcacaataagagcgaaccagcctgggagtgggaggatgcgcaggggttttctgcacttctacactcaggtaaatgcgaatgtaaggaacagacattaggaaatgccaaggcattctgtggaatgaaatattcatatgtgctaaaaataaagattttatcagctcatgataaaggtactcatgttgaggtcaatgtgaagattaaaaaggtcttaaaatctaccaaactgaagattttccgaggaaagcgaacattatatccagaatcatggacggacagaggatgcacttgtccaatcctcaatcctggtttggaataccttgtagcaggacatgaggatataagaacaggcaaactaattgtgaatatgaaaagctttgtccagcactggaaaccttctcttggaagaaaagtcatggatattttaaaaagagagtgcaagtag

SEQ ID NO: 172 - protein, 597 aa, Homo sapiens
KACNPRMGNLALGRKLWADTTCGQNATELYCFYSENKDLTCRQPKCDKCNAAYPHLAHLPSAMADSSFRFPRTWWQSAEDVHREKIQLDLEAEFYFTHLIVMFKSPRPAAMVLDRSQDFGKTWKPYKYFATNCSATFGLEDDVVKKGAICTSKYSSPFPCTGGEVIFKALSPPHDTENPYSAKVQEQLKITNLRVQLLKRQSCPCQRNDLNEEPQHFTHYAIYDFIVKGSCFCNGHADQCIPVHGFRPVKAPGTFHMVHGKCMCKHNTAGSHCQHCAPLYNDRPWEAADGKTGAPNECRACKCNGHADTCHFDVNVWEASGNRSGGVCDDCQHNTEGQYCQRCKPGFYRDLRRPFSAPDACKPCSCHPVGSAVLPANSVTFCDPSNGDCPCKPGVAGRRCDRCMVGYWGFGDYGCRPCDCAGSCDPITGDCISSHTDIDWYHEVPDFRPVHNKSEPAWEWEDAQGFSALLHSGKCECKEQTLGNAKAFCGMKYSYVLKIKILSAHDKGTHVEVNVKIKKVLKSTKLKIFRGKRTLYPESWTDRGCTCPILNPGLEYLVAGHEDIRTGKLIVNMKSFVQHWKPSLGRKVMDILKRECK

SEQ ID NO: 173 - DNA, 1794 bp, Homo sapiens
  CDS (1)..(1794)
aaagcctgcaaccctcggatgggaaatttggctttggggcgaaaactctgggcagacaccacctgcggtcagaatgctaccgaactgtactgcttctacagtgagaacaaggatctgacttgtcggcagcccaaatgtgacaagtgcaatgctgcctatcctcacctggctcacctgccatctgccatggcagactcatccttccggtttcctcgcacatggtggcagtctgcggaggatgtgcacagagaaaagatccagttagacctggaagctgaattctacttcactcacctaattgtgatgttcaagtcccccaggccggctgccatggtgctggaccgctcccaggactttgggaaaacatggaagccttataagtactttgcgactaactgctccgctacatttggcctggaagatgatgttgtcaagaagggcgctatttgtacttctaaatactccagtccttttccatgcactggaggagaggttattttcaaagctttgtcaccaccacacgatacagagaacccttacagtgccaaagttcaggagcagctgaagatcaccaaccttcgcgtgcagctgctgaaacgacagtcttgtccctgtcagagaaatgacctgaacgaagagcctcaacattttacacactatgcgatctatgatttcattgtcaagggcagctgcttctgcaatggccacgccgatcaatgcatacctgttcatggcttcagacctgtcaaggccccaggaacattccacatggtccatgggaagtgtatgtgtaagcacaacacagcaggcagccactgccagcactgtgccccgttatacaatgaccggccatgggaggcagctgatggcaaaacgggggctcccaacgagtgcagaacccgcaagtgtaatgggcatgctgatacctgtcacttcgacgttaatgtgtgggaggcatcagggaatcgtagtggtggtgtctgtgatgactgtcagcacaacacagaaggacagtattgccagaggtgcaagccaggcttctatcgtgacctgcggagacccttctcagctccagatgcttgcaaaccgtgttcctgccatccagtaggatcagctgtccttcctgccaactcagtgaccttctgcgaccccagcaatggtgactgcccttgcaagcctggggtggcagggcgacgttgtgacaggtgcatggtgggatactggggcttcggagactatggctgtcgaccatgtgactgtgcggggagctgtgaccctatcaccggagactgcatcagcagccacacagacatagactggtgtcatgaagttcctgacttccgtcccgtgcacaataagagcgaaccagcctgggagtgggaggatgcgcaggggttttctgcacttctacactcaggtaaatgcgaatgtaaggaacagacattaggaaatgccaaggcattctgtggaatgaaatattcatatgtgctaaaaataaagattttatcagctcatgataaaggtactcatgttgaggtcaatgtgaagattaaaaaggtcttaaaatctaccaaactgaagattttccgaggaaagcgaacattatatccagaatcatggacggacagaggatgcacttgtccaatcctcaatcctggtttggaataccttgtagcaggacatgaggatataagaacaggcaaactaattgtgaatatgaaaagctttgtccagcactggaaaccttctcttggaagaaaagtcatggatattttaaaaagagagtgcaagtag

SEQ ID NO: 174 - protein, 597 aa, Homo sapiens
KACNPRMGNLALGRKLWADTTCGQNATELYCFYSENKDLTCRQPKCDKCNAAYPHLAHLPSAMADSSFRFPRTWWQSAEDVHREKIQLDLEAEFYFTHLIVMFKSPRPAAMVLDRSQDFGKTWKPYKYFATNCSATFGLEDDVVKKGAICTSKYSSPFPCTGGEVIFKALSPPHDTENPYSAKVQEQLKITNLRVQLLKRQSCPCQRNDLNEEPQHFTHYAIYDFIVKGSCFCNGHADQCIPVHGFRPVKAPGTFHMVHGKCMCKHNTAGSHCQHCAPLYNDRPWEAADGKTGAPNECRTRKCNGHADTCHFDVNVWEASGNRSGGVCDDCQHNTEGQYCQRCKPGFYRDLRRPFSAPDACKPCSCHPVGSAVLPANSVTFCDPSNGDCPCKPGVAGRRCDRCMVGYWGFGDYGCRPCDCAGSCDPITGDCISSHTDIDWCHEVPDFRPVHNKSEPAWEWEDAQGFSALLHSGKCECKEQTLGNAKAFCGMKYSYVLKIKILSAHDKGTHVEVNVKIKKVLKSTKLKIFRGKRTLYPESWTDRGCTCPILNPGLEYLVAGHEDIRTGKLIVNMKSFVQHWKPSLGRKVMDILKRECK

SEQ ID NO: 175 - DNA, 1794 bp, Homo sapiens
  CDS (1)..(1794)
aaagcctgcaaccctcggatgggaaatttggctttggggcgaaaactctgggcagacaccacctgcggtcagaatgctaccgaactgtactgcttctacagtgagaacaaggatctgacttgtcggcagcccaaatgtgacaagtgcaatgctgcctatcctcacctggctcacctgccatctgccatggcagactcatccttccggtttcctcgcacatggtggcagtctgcggaggatgtgcacagagaaaagatccagttagacctggaagctgaattctacttcactcacctaattgtgatgttcaagtcccccaggccggctgccatggtgctggaccgctcccaggactttgggaaaacatggaagccttataagtactttgcgactaactgctccgctacatttggcctggaagatgatgttgtcaagaagggcgctatttgtacttctaaatactccagtccttttccatgcactggaggagaggttattttcaaagctttgtcaccaccacacgatacagagaacccttacagtgccaaagttcaggagcagctgaagatcaccaaccttcgcgtgcagctgctgaaacgacagtcttgtccctgtcagagaaatgacctgaacgaagagcctcaacattttacacactatgcgatctatgatttcattgtcaagggcagctgcttctgcaatggccacgccgatcaatgcatacctgttcatggcttcagacctgtcaaggccccaggaacattccacatggtccatgggaagtgtatgtgtaagcacaacacagcaggcagccactgccagcactgtgccccgttatacaatgaccggccatgggaggcagctgatggcaaaacgggggctcccaacgagtgcagaacctgcaagtgtaatgggcatgctgatacctgtcacttcgacgttaatgtgtgggaggcatcagggagtcgtagtggtggtgtctgtgatgactgtcagcacaacacagaaggacagtattgccagaggtgcaagccaggcttctatcgtgacctgcggagacccttctcagctccagatgcttgcaaaccgtgttcctgccatccagtaggatcagctgtccttcctgccaactcagtgaccttctgcgaccccagcaatggtgactgcccttgcaagcctggggtggcagggcgacgttgtgacaggtgcatggtgggatactggggcttcggagactatggctgtcgaccatgtgactgtgcggggagctgtgaccctatcaccggagactgcatcagcagccacacagacatagactggtgtcatgaagttcctgacttccgtcccgtgcacaataagagcgaaccagcctgggagtgggaggatgcgcaggggttttctgcacttctacactcaggtaaatgcgaatgtaaggaacagacattaggaaatgccaaggcattctgtggaatgaaatattcatatgtgctaaaaataaagattttatcagctcatgataaaggtactcatgttgaggtcaatgtgaagattaaaaaggtcttaaaatctaccaaactgaagattttccgaggaaagcgaacattatatccagaatcatggacggacagaggatgcacttgtccaatcctcaatcctggtttggaataccttgtagcaggacatgaggatataagaacaggcaaactaattgtgaatatgaaaagctttgtccagcactggaaaccttctcttggaagaaaagtcatggatattttaaaaagagagtgcaagtag

SEQ ID NO: 176 - protein, 597 aa, Homo sapiens
KACNPRMGNLALGRKLWADTTCGQNATELYCFYSENKDLTCRQPKCDKCNAAYPHLAHLPSAMADSSFRFPRTWWQSAEDVHREKIQLDLEAEFYFTHLIVMFKSPRPAAMVLDRSQDFGKTWKPYKYFATNCSATFGLEDDVVKKGAICTSKYSSPFPCTGGEVIFKALSPPHDTENPYSAKVQEQLKITNLRVQLLKRQSCPCQRNDLNEEPQHFTHYAIYDFIVKGSCFCNGHADQCIPVHGFRPVKAPGTFHMVHGKCMCKHNTAGSHCQHCAPLYNDRPWEAADGKTGAPNECRTCKCNGHADTCHFDVNVWEASGSRSGGVCDDCQHNTEGQYCQRCKPGFYRDLRRPFSAPDACKPCSCHPVGSAVLPANSVTFCDPSNGDCPCKPGVAGRRCDRCMVGYWGFGDYGCRPCDCAGSCDPITGDCISSHTDIDWCHEVPDFRPVHNKSEPAWEWEDAQGFSALLHSGKCECKEQTLGNAKAFCGMKYSYVLKIKILSAHDKGTHVEVNVKIKKVLKSTKLKIFRGKRTLYPESWTDRGCTCPILNPGLEYLVAGHEDIRTGKLIVNMKSFVQHWKPSLGRKVMDILKRECK

SEQ ID NO: 177 - DNA, 1794 bp, Homo sapiens
  CDS (1)..(1794)
aaagcctgcaaccctcggatgggaaatttggctttggggcgaaaactctgggcagacaccacctgcggtcagaatgctaccgaactgtactgcttctacagtgagaacaaggatctgacttgtcggcagcccaaatgtgacaagtgcaatgctgcctatcctcacctggctcacctgccatctgccatggcagactcatccttccggtttcctcgcacatggtggcagtctgcggaggatgtgcacagagaaaagatccagttagacctggaagctgaattctacttcactcacctaattgtgatgttcaagtcccccaggccggctgccatggtgctggaccgctcccaggactttgggaaaacatggaagccttataagtactttgcgactaactgctccgctacatttggcctggaagatgatgttgtcaagaagggcgctatttgtacttctaaatactccagtccttttccatgcactggaggagaggttattttcaaagctttgtcaccaccacacgatacagagaacccttacagtgccaaagttcaggagcagctgaagatcaccaaccttcgcgtgcagctgctgaaacgacagtcttgtccctgtcagagaaatgacctgaacgaagagcctcaacattttacacactatgcgatctatgatttcattgtcaagggcagctgcttctgcaatggccacgccgatcaatgcatacctgttcatggcttcagacctgtcaaggccccaggaacattccacatggtccatgggaagtgtatgtgtaagcacaacacagcaggcagccactgccagcactgtgccccgttatacaatgaccggccatgggaggcagctgatggcaaaacgggggctcccaacgagtgcagaacctgcaagtgtaatgggcatgctgatacctgtcacttcgacgttaatgtgtgggaggcatcagggaatcgtagtggtggtgtctgtgatgactgtcagcacaacacagaaggacagtattgccagaggtgcaagccaggcttctatcgtgacctgcggagacccttctcagctccagatgcttgcaaaccgtgttcctgccatccagtaggatcagctgtccttcctgccaactcagtgaccttctgcgaccccagcaatggtgactgcccttgcaagcctggggtggcagggcgacgttgtgacaggtgcatggtgggatactggggcttcggagactatggctgtcgaccatgtgactgtgcggggagctgtgaccctatcaccggagactgcatcagcagccacacagacatagactggtatcatgaagttcctgacttccgtcccgtgcacaataagagcgaaccagcctgggagtgggaggatgcgcaggggttttctgcacttctacactcaggtaaatgcgaatgtaaggaacagacattaggaaatgccaaggcattctgtggaatgaaatattcatatgtgctaaaaataaagattttatcagctcatgataaaggtactcatgttgaggtcaatgtgaagattaaaaaggtcttaaaatctaccaaactgaagattttccgaggaaagcgaacattatatccagaatcatggacggacagaggatgcacttgtccaatcctcaatcctggtttggaataccttgtagcaggacatgaggatataagaacaggcaaactaattgtgaatatgaaaagctttgtccagcactggaaaccttctcttggaagaaaagtcatggatattttaaaaagagagtgcaagtag

SEQ ID NO: 178 - protein, 597 aa, Homo sapiens
KACNPRMGNLALGRKLWADTTCGQNATELYCFYSENKDLTCRQPKCDKCNAAYPHLAHLPSAMADSSFRFPRTWWQSAEDVHREKIQLDLEAEFYFTHLIVMFKSPRPAAMVLDRSQDFGKTWKPYKYFATNCSATFGLEDDVVKKGAICTSKYSSPFPCTGGEVIFKALSPPHDTENPYSAKVQEQLKITNLRVQLLKRQSCPCQRNDLNEEPQHFTHYAIYDFIVKGSCFCNGHADQCIPVHGFRPVKAPGTFHMVHGKCMCKHNTAGSHCQHCAPLYNDRPWEAADGKTGAPNECRTCKCNGHADTCHFDVNVWEASGNRSGGVCDDCQHNTEGQYCQRCKPGFYRDLRRPFSAPDACKPCSCHPVGSAVLPANSVTFCDPSNGDCPCKPGVAGRRCDRCMVGYWGFGDYGCRPCDCAGSCDPITGDCISSHTDIDWYHEVPDFRPVHNKSEPAWEWEDAQGFSALLHSGKCECKEQTLGNAKAFCGMKYSYVLKIKILSAHDKGTHVEVNVKIKKVLKSTKLKIFRGKRTLYPESWTDRGCTCPILNPGLEYLVAGHEDIRTGKLIVNMKSFVQHWKPSLGRKVMDILKRECK

SEQ ID NO: 179 - DNA, 1794 bp, Homo sapiens
  CDS (1)..(1794)
aaagcctgcaaccctcggatgggaaatttggctttggggcgaaaactctgggcagacaccacctgcggtcagaatgctaccgaactgtactgcttctacagtgagaacaaggatctgacttgtcggcagcccaaatgtgacaagtgcaatgctgcctatcctcacctggctcacctgccatctgccatggcagactcatccttccggtttcctcgcacatggtggcagtctgcggaggatgtgcacagagaaaagatccagttagacctggaagctgaattctacttcactcacctaattgtgatgttcaagtcccccaggccggctgccatggtgctggaccgctcccaggactttgggaaaacatggaagccttataagtactttgcgactaactgctccgctacatttggcctggaagatgatgttgtcaagaagggcgctatttgtacttctaaatactccagtccttttccatgcactggaggagaggttattttcaaagctttgtcaccaccacacgatacagagaacccttacagtgccaaagttcaggagcagctgaagatcaccaaccttcgcgtgcagctgctgaaacgacagtcttgtccctgtcagagaaatgacctgaacgaagagcctcaacattttacacactatgcgatctatgatttcattgtcaagggcagctgcttctgcaatggccacgccgatcaatgcatacctgttcatggcttcagacctgtcaaggccccaggaacattccacatggtccatgggaagtgtatgtgtaagcacaacacagcaggcagccactgccagcactgtgccccgttatacaatgaccggccatgggaggcagctgatggcaaaacgggggctcccaacgagtgcagaacccgcaagtgtaatgggcatgctgatacctgtcacttcgacgttaatgtgtgggaggcatcagggagtcgtagtggtggtgtctgtgatgactgtcagcacaacacagaaggacagtattgccagaggtgcaagccaggcttctatcgtgacctgcggagacccttctcagctccagatgcttgcaaaccgtgttcctgccatccagtaggatcagctgtccttcctgccaactcagtgaccttctgcgaccccagcaatggtgactgcccttgcaagcctggggtggcagggcgacgttgtgacaggtgcatggtgggatactggggcttcggagactatggctgtcgaccatgtgactgtgcggggagctgtgaccctatcaccggagactgcatcagcagccacacagacatagactggtgtcatgaagttcctgacttccgtcccgtgcacaataagagcgaaccagcctgggagtgggaggatgcgcaggggttttctgcacttctacactcaggtaaatgcgaatgtaaggaacagacattaggaaatgccaaggcattctgtggaatgaaatattcatatgtgctaaaaataaagattttatcagctcatgataaaggtactcatgttgaggtcaatgtgaagattaaaaaggtcttaaaatctaccaaactgaagattttccgaggaaagcgaacattatatccagaatcatggacggacagaggatgcacttgtccaatcctcaatcctggtttggaataccttgtagcaggacatgaggatataagaacaggcaaactaattgtgaatatgaaaagctttgtccagcactggaaaccttctcttggaagaaaagtcatggatattttaaaaagagagtgcaagtag

SEQ ID NO: 180 - protein, 597 aa, Homo sapiens
KACNPRMGNLALGRKLWADTTCGQNATELYCFYSENKDLTCRQPKCDKCNAAYPHLAHLPSAMADSSFRFPRTWWQSAEDVHREKIQLDLEAEFYFTHLIVMFKSPRPAAMVLDRSQDFGKTWKPYKYFATNCSATFGLEDDVVKKGAICTSKYSSPFPCTGGEVIFKALSPPHDTENPYSAKVQEQLKITNLRVQLLKRQSCPCQRNDLNEEPQHFTHYAIYDFIVKGSCFCNGHADQCIPVHGFRPVKAPGTFHMVHGKCMCKHNTAGSHCQHCAPLYNDRPWEAADGKTGAPNECRTRKCNGHADTCHFDVNVWEASGSRSGGVCDDCQHNTEGQYCQRCKPGFYRDLRRPFSAPDACKPCSCHPVGSAVLPANSVTFCDPSNGDCPCKPGVAGRRCDRCMVGYWGFGDYGCRPCDCAGSCDPITGDCISSHTDIDWCHEVPDFRPVHNKSEPAWEWEDAQGFSALLHSGKCECKEQTLGNAKAFCGMKYSYVLKIKILSAHDKGTHVEVNVKIKKVLKSTKLKIFRGKRTLYPESWTDRGCTCPILNPGLEYLVAGHEDIRTGKLIVNMKSFVQHWKPSLGRKVMDILKRECK

SEQ ID NO: 181 - DNA, 1794 bp, Homo sapiens
  CDS (1)..(1794)
aaagcctgcaaccctcggatgggaaatttggctttggggcgaaaactctgggcagacaccacctgcggtcagaatgctaccgaactgtactgcttctacagtgagaacaaggatctgacttgtcggcagcccaaatgtgacaagtgcaatgctgcctatcctcacctggctcacctgccatctgccatggcagactcatccttccggtttcctcgcacatggtggcagtctgcggaggatgtgcacagagaaaagatccagttagacctggaagctgaattctacttcactcacctaattgtgatgttcaagtcccccaggccggctgccatggtgctggaccgctcccaggactttgggaaaacatggaagccttataagtactttgcgactaactgctccgctacatttggcctggaagatgatgttgtcaagaagggcgctatttgtacttctaaatactccagtccttttccatgcactggaggagaggttattttcaaagctttgtcaccaccacacgatacagagaacccttacagtgccaaagttcaggagcagctgaagatcaccaaccttcgcgtgcagctgctgaaacgacagtcttgtccctgtcagagaaatgacctgaacgaagagcctcaacattttacacactatgcgatctatgatttcattgtcaagggcagctgcttctgcaatggccacgccgatcaatgcatacctgttcatggcttcagacctgtcaaggccccaggaacattccacatggtccatgggaagtgtatgtgtaagcacaacacagcaggcagccactgccagcactgtgccccgttatacaatgaccggccatgggaggcagctgatggcaaaacgggggctcccaacgagtgcagaacccgcaagtgtaatgggcatgctgatacctgtcacttcgacgttaatgtgtgggaggcatcagggaatcgtagtggtggtgtctgtgatgactgtcagcacaacacagaaggacagtattgccagaggtgcaagccaggcttctatcgtgacctgcggagacccttctcagctccagatgcttgcaaaccgtgttcctgccatccagtaggatcagctgtccttcctgccaactcagtgaccttctgcgaccccagcaatggtgactgcccttgcaagcctggggtggcagggcgacgttgtgacaggtgcatggtgggatactggggcttcggagactatggctgtcgaccatgtgactgtgcggggagctgtgaccctatcaccggagactgcatcagcagccacacagacatagactggtatcatgaagttcctgacttccgtcccgtgcacaataagagcgaaccagcctgggagtgggaggatgcgcaggggttttctgcacttctacactcaggtaaatgcgaatgtaaggaacagacattaggaaatgccaaggcattctgtggaatgaaatattcatatgtgctaaaaataaagattttatcagctcatgataaaggtactcatgttgaggtcaatgtgaagattaaaaaggtcttaaaatctaccaaactgaagattttccgaggaaagcgaacattatatccagaatcatggacggacagaggatgcacttgtccaatcctcaatcctggtttggaataccttgtagcaggacatgaggatataagaacaggcaaactaattgtgaatatgaaaagctttgtccagcactggaaaccttctcttggaagaaaagtcatggatattttaaaaagagagtgcaagtag

SEQ ID NO: 182 - protein, 597 aa, Homo sapiens
KACNPRMGNLALGRKLWADTTCGQNATELYCFYSENKDLTCRQPKCDKCNAAYPHLAHLPSAMADSSFRFPRTWWQSAEDVHREKIQLDLEAEFYFTHLIVMFKSPRPAAMVLDRSQDFGKTWKPYKYFATNCSATFGLEDDVVKKGAICTSKYSSPFPCTGGEVIFKALSPPHDTENPYSAKVQEQLKITNLRVQLLKRQSCPCQRNDLNEEPQHFTHYAIYDFIVKGSCFCNGHADQCIPVHGFRPVKAPGTFHMVHGKCMCKHNTAGSHCQHCAPLYNDRPWEAADGKTGAPNECRTRKCNGHADTCHFDVNVWEASGNRSGGVCDDCQHNTEGQYCQRCKPGFYRDLRRPFSAPDACKPCSCHPVGSAVLPANSVTFCDPSNGDCPCKPGVAGRRCDRCMVGYWGFGDYGCRPCDCAGSCDPITGDCISSHTDIDWYHEVPDFRPVHNKSEPAWEWEDAQGFSALLHSGKCECKEQTLGNAKAFCGMKYSYVLKIKILSAHDKGTHVEVNVKIKKVLKSTKLKIFRGKRTLYPESWTDRGCTCPILNPGLEYLVAGHEDIRTGKLIVNMKSFVQHWKPSLGRKVMDILKRECK

SEQ ID NO: 183 - DNA, 1794 bp, Homo sapiens
  CDS (1)..(1794)
aaagcctgcaaccctcggatgggaaatttggctttggggcgaaaactctgggcagacaccacctgcggtcagaatgctaccgaactgtactgcttctacagtgagaacaaggatctgacttgtcggcagcccaaatgtgacaagtgcaatgctgcctatcctcacctggctcacctgccatctgccatggcagactcatccttccggtttcctcgcacatggtggcagtctgcggaggatgtgcacagagaaaagatccagttagacctggaagctgaattctacttcactcacctaattgtgatgttcaagtcccccaggccggctgccatggtgctggaccgctcccaggactttgggaaaacatggaagccttataagtactttgcgactaactgctccgctacatttggcctggaagatgatgttgtcaagaagggcgctatttgtacttctaaatactccagtccttttccatgcactggaggagaggttattttcaaagctttgtcaccaccacacgatacagagaacccttacagtgccaaagttcaggagcagctgaagatcaccaaccttcgcgtgcagctgctgaaacgacagtcttgtccctgtcagagaaatgacctgaacgaagagcctcaacattttacacactatgcgatctatgatttcattgtcaagggcagctgcttctgcaatggccacgccgatcaatgcatacctgttcatggcttcagacctgtcaaggccccaggaacattccacatggtccatgggaagtgtatgtgtaagcacaacacagcaggcagccactgccagcactgtgccccgttatacaatgaccggccatgggaggcagctgatggcaaaacgggggctcccaacgagtgcagaacctgcaagtgtaatgggcatgctgatacctgtcacttcgacgttaatgtgtgggaggcatcagggagtcgtagtggtggtgtctgtgatgactgtcagcacaacacagaaggacagtattgccagaggtgcaagccaggcttctatcgtgacctgcggagacccttctcagctccagatgcttgcaaaccgtgttcctgccatccagtaggatcagctgtccttcctgccaactcagtgaccttctgcgaccccagcaatggtgactgcccttgcaagcctggggtggcagggcgacgttgtgacaggtgcatggtgggatactggggcttcggagactatggctgtcgaccatgtgactgtgcggggagctgtgaccctatcaccggagactgcatcagcagccacacagacatagactggtatcatgaagttcctgacttccgtcccgtgcacaataagagcgaaccagcctgggagtgggaggatgcgcaggggttttctgcacttctacactcaggtaaatgcgaatgtaaggaacagacattaggaaatgccaaggcattctgtggaatgaaatattcatatgtgctaaaaataaagattttatcagctcatgataaaggtactcatgttgaggtcaatgtgaagattaaaaaggtcttaaaatctaccaaactgaagattttccgaggaaagcgaacattatatccagaatcatggacggacagaggatgcacttgtccaatcctcaatcctggtttggaataccttgtagcaggacatgaggatataagaacaggcaaactaattgtgaatatgaaaagctttgtccagcactggaaaccttctcttggaagaaaagtcatggatattttaaaaagagagtgcaagtag

SEQ ID NO: 184 - protein, 597 aa, Homo sapiens
KACNPRMGNLALGRKLWADTTCGQNATELYCFYSENKDLTCRQPKCDKCNAAYPHLAHLPSAMADSSFRFPRTWWQSAEDVHREKIQLDLEAEFYFTHLIVMFKSPRPAAMVLDRSQDFGKTWKPYKYFATNCSATFGLEDDVVKKGAICTSKYSSPFPCTGGEVIFKALSPPHDTENPYSAKVQEQLKITNLRVQLLKRQSCPCQRNDLNEEPQHFTHYAIYDFIVKGSCFCNGHADQCIPVHGFRPVKAPGTFHMVHGKCMCKHNTAGSHCQHCAPLYNDRPWEAADGKTGAPNECRTCKCNGHADTCHFDVNVWEASGSRSGGVCDDCQHNTEGQYCQRCKPGFYRDLRRPFSAPDACKPCSCHPVGSAVLPANSVTFCDPSNGDCPCKPGVAGRRCDRCMVGYWGFGDYGCRPCDCAGSCDPITGDCISSHTDIDWYHEVPDFRPVHNKSEPAWEWEDAQGFSALLHSGKCECKEQTLGNAKAFCGMKYSYVLKIKILSAHDKGTHVEVNVKIKKVLKSTKLKIFRGKRTLYPESWTDRGCTCPILNPGLEYLVAGHEDIRTGKLIVNMKSFVQHWKPSLGRKVMDILKRECK

SEQ ID NO: 185 - DNA, 1794 bp, Homo sapiens
  CDS (1)..(1794)
aaagcctgcaaccctcggatgggaaatttggctttggggcgaaaactctgggcagacaccacctgcggtcagaatgctaccgaactgtactgcttctacagtgagaacaaggatctgacttgtcggcagcccaaatgtgacaagtgcaatgctgcctatcctcacctggctcacctgccatctgccatggcagactcatccttccggtttcctcgcacatggtggcagtctgcggaggatgtgcacagagaaaagatccagttagacctggaagctgaattctacttcactcacctaattgtgatgttcaagtcccccaggccggctgccatggtgctggaccgctcccaggactttgggaaaacatggaagccttataagtactttgcgactaactgctccgctacatttggcctggaagatgatgttgtcaagaagggcgctatttgtacttctaaatactccagtccttttccatgcactggaggagaggttattttcaaagctttgtcaccaccacacgatacagagaacccttacagtgccaaagttcaggagcagctgaagatcaccaaccttcgcgtgcagctgctgaaacgacagtcttgtccctgtcagagaaatgacctgaacgaagagcctcaacattttacacactatgcgatctatgatttcattgtcaagggcagctgcttctgcaatggccacgccgatcaatgcatacctgttcatggcttcagacctgtcaaggccccaggaacattccacatggtccatgggaagtgtatgtgtaagcacaacacagcaggcagccactgccagcactgtgccccgttatacaatgaccggccatgggaggcagctgatggcaaaacgggggctcccaacgagtgcagaacccgcaagtgtaatgggcatgctgatacctgtcacttcgacgttaatgtgtgggaggcatcagggagtcgtagtggtggtgtctgtgatgactgtcagcacaacacagaaggacagtattgccagaggtgcaagccaggcttctatcgtgacctgcggagacccttctcagctccagatgcttgcaaaccgtgttcctgccatccagtaggatcagctgtccttcctgccaactcagtgaccttctgcgaccccagcaatggtgactgcccttgcaagcctggggtggcagggcgacgttgtgacaggtgcatggtgggatactggggcttcggagactatggctgtcgaccatgtgactgtgcggggagctgtgaccctatcaccggagactgcatcagcagccacacagacatagactggtatcatgaagttcctgacttccgtcccgtgcacaataagagcgaaccagcctgggagtgggaggatgcgcaggggttttctgcacttctacactcaggtaaatgcgaatgtaaggaacagacattaggaaatgccaaggcattctgtggaatgaaatattcatatgtgctaaaaataaagattttatcagctcatgataaaggtactcatgttgaggtcaatgtgaagattaaaaaggtcttaaaatctaccaaactgaagattttccgaggaaagcgaacattatatccagaatcatggacggacagaggatgcacttgtccaatcctcaatcctggtttggaataccttgtagcaggacatgaggatataagaacaggcaaactaattgtgaatatgaaaagctttgtccagcactggaaaccttctcttggaagaaaagtcatggatattttaaaaagagagtgcaagtag

SEQ ID NO: 186 - protein, 597 aa, Homo sapiens
KACNPRMGNLALGRKLWADTTCGQNATELYCFYSENKDLTCRQPKCDKCNAAYPHLAHLPSAMADSSFRFPRTWWQSAEDVHREKIQLDLEAEFYFTHLIVMFKSPRPAAMVLDRSQDFGKTWKPYKYFATNCSATFGLEDDVVKKGAICTSKYSSPFPCTGGEVIFKALSPPHDTENPYSAKVQEQLKITNLRVQLLKRQSCPCQRNDLNEEPQHFTHYAIYDFIVKGSCFCNGHADQCIPVHGFRPVKAPGTFHMVHGKCMCKHNTAGSHCQHCAPLYNDRPWEAADGKTGAPNECRTRKCNGHADTCHFDVNVWEASGSRSGGVCDDCQHNTEGQYCQRCKPGFYRDLRRPFSAPDACKPCSCHPVGSAVLPANSVTFCDPSNGDCPCKPGVAGRRCDRCMVGYWGFGDYGCRPCDCAGSCDPITGDCISSHTDIDWYHEVPDFRPVHNKSEPAWEWEDAQGFSALLHSGKCECKEQTLGNAKAFCGMKYSYVLKIKILSAHDKGTHVEVNVKIKKVLKSTKLKIFRGKRTLYPESWTDRGCTCPILNPGLEYLVAGHEDIRTGKLIVNMKSFVQHWKPSLGRKVMDILKRECK

SEQ ID NO: 187 - DNA, 1575 bp, Homo sapiens
  CDS (1)..(1575)
atggggagctgcgcgcggctgctgctgctctggggccgcacggtggtggccgcaggactgagtggagtagctggagtgagttcccgctgtgaaaaagcctgcaaccctcggatgggaaatttggctttggggcgaaaactctgggcagacaccacctgcggtcagaatgctaccgaactgtactgcttctacagtgagaacacggatctgacttgtcggcagcccaaatgtgacaagtgcaatgctgcctatcctcacctggctcacctgccatctgccatggcagactcatccttccggtttcctcgcacatggtggcagtctgcggaggatgtgcacagagaaaagatccagttagacctggaagctgaattctacttcactcacctaattgtgatgttcaagtcccccaggccggctgccatggtgctggaccgctcccaggactttgggaaaacatggaagccttataagtactttgcgactaactgctccgctacatttggcctggaagatgatgttgtcaagaagggcgctatttgtactcctaaatactccagtccttttccatgcactggaggagaggttattttcaaagctttgtcaccaccatacgatacagagaacccttacagtgccaaagttcaggagcagctgaagatcaccaaccttcgcgtgcagctgctgaaacgacagtcttatccctgtcagagaaatgacctgaacgaagagcctcaacattttacacactatgcgatctatgatttcattgtcaagggcagctgcttctgcaatggccacgccgatcaatgcatacctgttcatggcttcagacctgtcaaggccccaggaacattccacatggtccatgggaagtgtatgtgtaagcacaacacagcaggcagccactgccagcactgtgccccgttatacaatgaccggccatgggaggcagctgatggcaaaacgggggctcccaacgagtgcagaacccgcaagtgtaatgggcatgctgatacctgtcacttcgacgttaatgtgtgggaggcatcagggagtcgtagtggtggtgtctgtgatgactgtcagcacaacacagaaggacagtattgccagaggtgcaagccaggcttctatcgtgacctgcggagacccttctcagctccagatgcttgcaaaccgtgttcctgccatccagtaggatcagctgtccttcctgccaactcagtgaccttctgcgaccccagcaatggtgactgcccttgcaagcctggggtggcagggcgacgttgtgacaggtgcatggtgggatactggggcttcggagactatggctgtcgaccatgtgactgtgcggggagctgtgaccctatcaccggagactgcatcagcagccacacagacatagactggtatcatgaagttcctgacttccgtcccgtgcacaataagagcgaaccagcctgggagtgggaggatgcgcaggggttttctgcacttctacactcaggtaaatgcgaatgtaaggaacagacattaggaaagggatccgagctcggtaccaagcttacgtag

SEQ ID NO: 188 - protein, 524 aa, Homo sapiens
MGSCARLLLLWGRTVVAAGLSGVAGVSSRCEKACNPRMGNLALGRKLWADTTCGQNATELYCFYSENTDLTCRQPKCDKCNAAYPHLAHLPSAMADSSFRFPRTWWQSAEDVHREKIQLDLEAEFYFTHLIVMFKSPRPAAMVLDRSQDFGKTWKPYKYFATNCSATFGLEDDVVKKGAICTPKYSSPFPCTGGEVIFKALSPPYDTENPYSAKVQEQLKITNLRVQLLKRQSYPCQRNDLNEEPQHFTHYAIYDFIVKGSCFCNGHADQCIPVHGFRPVKAPGTFHMVHGKCMCKHNTAGSHCQHCAPLYNDRPWEAADGKTGAPNECRTRKCNGHADTCHFDVNVWEASGSRSGGVCDDCQHNTEGQYCQRCKPGFYRDLRRPFSAPDACKPCSCHPVGSAVLPANSVTFCDPSNGDCPCKPGVAGRRCDRCMVGYWGFGDYGCRPCDCAGSCDPITGDCISSHTDIDWYHEVPDFRPVHNKSEPAWEWEDAQGFSALLHSGKCECKEQTLGKGSELGTKLT

SEQ ID NO: 189 - DNA, 1575 bp, Homo sapiens
  CDS (1)..(1575)
atggggagctgcgcgcggctgctgctgctctggggctgcacggtggtggccgcaggactgagtggagtagctggagtgagttcccgctgtgaaaaagcctgcaaccctcggatgggaaatttggctttggggcgaaaactctgggcagacaccacctgcggtcagaatgctaccgaactgtactgcttctacagtgagaacacggatctgacttgtcggcagcccaaatgtgacaagtgcaatgctgcctatcctcacctggctcacctgccatctgccatggcagactcatccttccggtttcctcgcacatggtggcagtctgcggaggatgtgcacagagaaaagatccagttagacctggaagctgaattctacttcactcacctaattgtgatgttcaagtcccccaggccggctgccatggtgctggaccgctcccaggactttgggaaaacatggaagccttataagtactttgcgactaactgctccgctacatttggcctggaagatgatgttgtcaagaagggcgctatttgtactcctaaatactccagtccttttccatgcactggaggagaggttattttcaaagctttgtcaccaccatacgatacagagaacccttacagtgccaaagttcaggagcagctgaagatcaccaaccttcgcgtgcagctgctgaaacgacagtcttatccctgtcagagaaatgacctgaacgaagagcctcaacattttacacactatgcgatctatgatttcattgtcaagggcagctgcttctgcaatggccacgccgatcaatgcatacctgttcatggcttcagacctgtcaaggccccaggaacattccacatggtccatgggaagtgtatgtgtaagcacaacacagcaggcagccactgccagcactgtgccccgttatacaatgaccggccatgggaggcagctgatggcaaaacgggggctcccaacgagtgcagaacccgcaagtgtaatgggcatgctgatacctgtcacttcgacgttaatgtgtgggaggcatcagggagtcgtagtggtggtgtctgtgatgactgtcagcacaacacagaaggacagtattgccagaggtgcaagccaggcttctatcgtgacctgcggagacccttctcagctccagatgcttgcaaaccgtgttcctgccatccagtaggatcagctgtccttcctgccaactcagtgaccttctgcgaccccagcaatggtgactgcccttgcaagcctggggtggcagggcgacgttgtgacaggtgcatggtgggatactggggcttcggagactatggctgtcgaccatgtgactgtgcggggagctgtgaccctatcaccggagactgcatcagcagccacacagacatagactggtatcatgaagttcctgacttccgtcccgtgcacaataagagcgaaccagcctgggagtgggaggatgcgcaggggttttctgcacttctacactcaggtaaatgcgaatgtaaggaacagacattaggaaagggatccgagctcggtaccaagcttacgtag

SEQ ID NO: 190 - protein, 524 aa, Homo sapiens
MGSCARLLLLWGCTVVAAGLSGVAGVSSRCEKACNPRMGNLALGRKLWADTTCGQNATELYCFYSENTDLTCRQPKCDKCNAAYPHLAHLPSAMADSSFRFPRTWWQSAEDVHREKIQLDLEAEFYFTHLIVMFKSPRPAAMVLDRSQDFGKTWKPYKYFATNCSATFGLEDDVVKKGAICTPKYSSPFPCTGGEVIFKALSPPYDTENPYSAKVQEQLKITNLRVQLLKRQSYPCQRNDLNEEPQHFTHYAIYDFIVKGSCFCNGHADQCIPVHGFRPVKAPGTFHMVHGKCMCKHNTAGSHCQHCAPLYNDRPWEAADGKTGAPNECRTRKCNGHADTCHFDVNVWEASGSRSGGVCDDCQHNTEGQYCQRCKPGFYRDLRRPFSAPDACKPCSCHPVGSAVLPANSVTFCDPSNGDCPCKPGVAGRRCDRCMVGYWGFGDYGCRPCDCAGSCDPITGDCISSHTDIDWYHEVPDFRPVHNKSEPAWEWEDAQGFSALLHSGKCECKEQTLGKGSELGTKLT

SEQ ID NO: 191 - DNA, 1545 bp, Homo sapiens
  CDS (1)..(1545)
atggggagctgcgcgcggctgctgctgctctggggccgcacggtggtggccgcaggactgagtggagtagctggagtgagttcccgctgtgaaaaagcctgcaaccctcggatgggaaatttggctttggggcgaaaactctgggcagacaccacctgcggtcagaatgctaccgaactgtactgcttctacagtgagaacacggatctgacttgtcggcagcccaaatgtgacaagtgcaatgctgcctatcctcacctggctcacctgccatctgccatggcagactcatccttccggtttcctcgcacatggtggcagtctgcggaggatgtgcacagagaaaagatccagttagacctggaagctgaattctacttcactcacctaattgtgatgttcaagtcccccaggccggctgccatggtgctggaccgctcccaggactttgggaaaacatggaagccttataagtactttgcgactaactgctccgctacatttggcctggaagatgatgttgtcaagaagggcgctatttgtactcctaaatactccagtccttttccatgcactggaggagaggttattttcaaagctttgtcaccaccatacgatacagagaacccttacagtgccaaagttcaggagcagctgaagatcaccaaccttcgcgtgcagctgctgaaacgacagtcttatccctgtcagagaaatgacctgaacgaagagcctcaacattttacacactatgcgatctatgatttcattgtcaagggcagctgcttctgcaatggccacgccgatcaatgcatacctgttcatggcttcagacctgtcaaggccccaggaacattccacatggtccatgggaagtgtatgtgtaagcacaacacagcaggcagccactgccagcactgtgccccgttatacaatgaccggccatgggaggcagctgatggcaaaacgggggctcccaacgagtgcagagcccgcaagtgtaatgggcatgctgatacctgtcacttcgacgttaatgtgtgggaggcatcagggagtcgtagtggtggtgtctgtgatgactgtcagcacaacacagaaggacagtattgccagaggtgcaagccaggcttctatcgtgacctgcggagacccttctcagctccagatgcttgcaaaccgtgttcctgccatccagtaggatcagctgtccttcctgccaactcagtgaccttctgcgaccccagcaatggtgactgcccttgcaagcctggggtggcagggcgacgttgtgacaggtgcatggtgggatactggggcttcggagactatggctgtcgaccatgtgactgtgcggggagctgtgaccctatcaccggagactgcatcagcagccacacagacatagactggtatcatgaagttcctgacttccgtcccgtgcacaataagagcgaaccagcctgggagtgggaggatgcgcaggggttttctgcacttctacactcaggtaaatgcgaatgtaaggaacagacattaggaaag

SEQ ID NO: 192 - protein, 515 aa, Homo sapiens
MGSCARLLLLWGRTVVAAGLSGVAGVSSRCEKACNPRMGNLALGRKLWADTTCGQNATELYCFYSENTDLTCRQPKCDKCNAAYPHLAHLPSAMADSSFRFPRTWWQSAEDVHREKIQLDLEAEFYFTHLIVMFKSPRPAAMVLDRSQDFGKTWKPYKYFATNCSATFGLEDDVVKKGAICTPKYSSPFPCTGGEVIFKALSPPYDTENPYSAKVQEQLKITNLRVQLLKRQSYPCQRNDLNEEPQHFTHYAIYDFIVKGSCFCNGHADQCIPVHGFRPVKAPGTFHMVHGKCMCKHNTAGSHCQHCAPLYNDRPWEAADGKTGAPNECRARKCNGHADTCHFDVNVWEASGSRSGGVCDDCQHNTEGQYCQRCKPGFYRDLRRPFSAPDACKPCSCHPVGSAVLPANSVTFCDPSNGDCPCKPGVAGRRCDRCMVGYWGFGDYGCRPCDCAGSCDPITGDCISSHTDIDWYHEVPDFRPVHNKSEPAWEWEDAQGFSALLHSGKCECKEQTLGK

SEQ ID NO: 193 - DNA, 1545 bp, Homo sapiens
  CDS (1)..(1545)
atggggagctgcgcgcggctgctgctgctctggggccgcacggtggtggccgcaggactgagtggagtagctggagtgagttcccgctgtgaaaaagcctgcaaccctcggatgggaaatttggctttggggcgaaaactctgggcagacaccacctgcggtcagaatgctaccgaactgtactgcttctacagtgagaacacggatctgacttgtcggcagcccaaatgtgacaagtgcaatgctgcctatcctcacctggctcacctgccatctgccatggcagactcatccttccggtttcctcgcacatggtggcagtctgcggaggatgtgcacagagaaaagatccagttagacctggaagctgaattctacttcactcacctaattgtgatgttcaagtcccccaggccggctgccatggtgctggaccgctcccaggactttgggaaaacatggaagccttataagtactttgcgactaactgctccgctacatttggcctggaagatgatgttgtcaagaagggcgctatttgtactcctaaatactccagtccttttccatgcactggaggagaggttattttcaaagctttgtcaccaccatacgatacagagaacccttacagtgccaaagttcaggagcagctgaagatcaccaaccttcgcgtgcagctgctgaaacgacagtcttatccctgtcagagaaatgacctgaacgaagagcctcaacattttacacactatgcgatctatgatttcattgtcaagggcagctgcttctgcaatggccacgccgatcaatgcatacctgttcatggcttcagacctgtcaaggccccaggaacattccacatggtccatgggaagtgtatgtgtaagcacaacacagcaggcagccactgccagcactgtgccccgttatacaatgaccggccatgggaggcagctgatggcaaaacgggggctcccaacgagtgcagaacctgcaagtgtaatgggcatgctgatacctgtcacttcgacgttaatgtgtgggaggcatcagggagtcgtagtggtggtgtctgtgatgactgtcagcacaacacagaaggacagtattgccagaggtgcaagccaggcttctatcgtgacctgcggagacccttctcagctccagatgcttgcaaaccgtgttcctgccatccagtaggatcagctgtccttcctgccaactcagtgaccttctgcgaccccagcaatggtgactgcccttgcaagcctggggtggcagggcgacgttgtgacaggtgcatggtgggatactggggcttcggagactatggctgtcgaccatgtgactgtgcggggagctgtgaccctatcaccggagactgcatcagcagccacacagacatagactggtatcatgaagttcctgacttccgtcccgtgcacaataagagcgaaccagcctgggagtgggaggatgcgcaggggttttctgcacttctacactcaggtaaatgcgaatgtaaggaacagacattaggaaag

SEQ ID NO: 194 - protein, 515 aa, Homo sapiens
MGSCARLLLLWGRTVVAAGLSGVAGVSSRCEKACNPRMGNLALGRKLWADTTCGQNATELYCFYSENTDLTCRQPKCDKCNAAYPHLAHLPSAMADSSFRFPRTWWQSAEDVHREKIQLDLEAEFYFTHLIVMFKSPRPAAMVLDRSQDFGKTWKPYKYFATNCSATFGLEDDVVKKGAICTPKYSSPFPCTGGEVIFKALSPPYDTENPYSAKVQEQLKITNLRVQLLKRQSYPCQRNDLNEEPQHFTHYAIYDFIVKGSCFCNGHADQCIPVHGFRPVKAPGTFHMVHGKCMCKHNTAGSHCQHCAPLYNDRPWEAADGKTGAPNECRTCKCNGHADTCHFDVNVWEASGSRSGGVCDDCQHNTEGQYCQRCKPGFYRDLRRPFSAPDACKPCSCHPVGSAVLPANSVTFCDPSNGDCPCKPGVAGRRCDRCMVGYWGFGDYGCRPCDCAGSCDPITGDCISSHTDIDWYHEVPDFRPVHNKSEPAWEWEDAQGFSALLHSGKCECKEQTLGK

SEQ ID NO: 195 - DNA, 1545 bp, Homo sapiens
  CDS (1)..(1545)
atggggagctgcgcgcggctgctgctgctctggggccgcacggtggtggccgcaggactgagtggagtagctggagtgagttcccgctgtgaaaaagcctgcaaccctcggatgggaaatttggctttggggcgaaaactctgggcagacaccacctgcggtcagaatgctaccgaactgtactgcttctacagtgagaacacggatctgacttgtcggcagcccaaatgtgacaagtgcaatgctgcctatcctcacctggctcacctgccatctgccatggcagactcatccttccggtttcctcgcacatggtggcagtctgcggaggatgtgcacagagaaaagatccagttagacctggaagctgaattctacttcactcacctaattgtgatgttcaagtcccccaggccggctgccatggtgctggaccgctcccaggactttgggaaaacatggaagccttataagtactttgcgactaactgctccgctacatttggcctggaagatgatgttgtcaagaagggcgctatttgtactcctaaatactccagtccttttccatgcactggaggagaggttattttcaaagctttgtcaccaccatacgatacagagaacccttacagtgccaaagttcaggagcagctgaagatcaccaaccttcgcgtgcagctgctgaaacgacagtcttatccctgtcagagaaatgacctgaacgaagagcctcaacattttacacactatgcgatctatgatttcattgtcaagggcagctgcttctgcaatggccacgccgatcaatgcatacctgttcatggcttcagacctgtcaaggccccaggaacattccacatggtccatgggaagtgtatgtgtaagcacaacacagcaggcagccactgccagcactgtgccccgttatacaatgaccggccatgggaggcagctgatggcaaaacgggggctcccaacgagtgcagaacccgcaagtgtaatgggcatgctgatacctgtcacttcgacgttaatgtgtgggaggcatcagggaatcgtagtggtggtgtctgtgatgactgtcagcacaacacagaaggacagtattgccagaggtgcaagccaggcttctatcgtgacctgcggagacccttctcagctccagatgcttgcaaaccgtgttcctgccatccagtaggatcagctgtccttcctgccaactcagtgaccttctgcgaccccagcaatggtgactgcccttgcaagcctggggtggcagggcgacgttgtgacaggtgcatggtgggatactggggcttcggagactatggctgtcgaccatgtgactgtgcggggagctgtgaccctatcaccggagactgcatcagcagccacacagacatagactggtatcatgaagttcctgacttccgtcccgtgcacaataagagcgaaccagcctgggagtgggaggatgcgcaggggttttctgcacttctacactcaggtaaatgcgaatgtaaggaacagacattaggaaag

SEQ ID NO: 196 - protein, 515 aa, Homo sapiens
MGSCARLLLLWGRTVVAAGLSGVAGVSSRCEKACNPRMGNLALGRKLWADTTCGQNATELYCFYSENTDLTCRQPKCDKCNAAYPHLAHLPSAMADSSFRFPRTWWQSAEDVHREKIQLDLEAEFYFTHLIVMFKSPRPAAMVLDRSQDFGKTWKPYKYFATNCSATFGLEDDVVKKGAICTPKYSSPFPCTGGEVIFKALSPPYDTENPYSAKVQEQLKITNLRVQLLKRQSYPCQRNDLNEEPQHFTHYAIYDFIVKGSCFCNGHADQCIPVHGFRPVKAPGTFHMVHGKCMCKHNTAGSHCQHCAPLYNDRPWEAADGKTGAPNECRTRKCNGHADTCHFDVNVWEASGNRSGGVCDDCQHNTEGQYCQRCKPGFYRDLRRPFSAPDACKPCSCHPVGSAVLPANSVTFCDPSNGDCPCKPGVAGRRCDRCMVGYWGFGDYGCRPCDCAGSCDPITGDCISSHTDIDWYHEVPDFRPVHNKSEPAWEWEDAQGFSALLHSGKCECKEQTLGK

SEQ ID NO: 197 - DNA, 1545 bp, Homo sapiens
  CDS (1)..(1545)
atggggagctgcgcgcggctgctgctgctctggggccgcacggtggtggccgcaggactgagtggagtagctggagtgagttcccgctgtgaaaaagcctgcaaccctcggatgggaaatttggctttggggcgaaaactctgggcagacaccacctgcggtcagaatgctaccgaactgtactgcttctacagtgagaacacggatctgacttgtcggcagcccaaatgtgacaagtgcaatgctgcctatcctcacctggctcacctgccatctgccatggcagactcatccttccggtttcctcgcacatggtggcagtctgcggaggatgtgcacagagaaaagatccagttagacctggaagctgaattctacttcactcacctaattgtgatgttcaagtcccccaggccggctgccatggtgctggaccgctcccaggactttgggaaaacatggaagccttataagtactttgcgactaactgctccgctacatttggcctggaagatgatgttgtcaagaagggcgctatttgtactcctaaatactccagtccttttccatgcactggaggagaggttattttcaaagctttgtcaccaccatacgatacagagaacccttacagtgccaaagttcaggagcagctgaagatcaccaaccttcgcgtgcagctgctgaaacgacagtcttatccctgtcagagaaatgacctgaacgaagagcctcaacattttacacactatgcgatctatgatttcattgtcaagggcagctgcttctgcaatggccacgccgatcaatgcatacctgttcatggcttcagacctgtcaaggccccaggaacattccacatggtccatgggaagtgtatgtgtaagcacaacacagcaggcagccactgccagcactgtgccccgttatacaatgaccggccatgggaggcagctgatggcaaaacgggggctcccaacgagtgcagaacccgcaagtgtaatgggcatgctgatacctgtcacttcgacgttaatgtgtgggaggcatcagggagtcgtagtggtggtgtctgtgatgactgtcagcacaacacagaaggacagtattgccagaggtgcaagccaggcttctatcgtgacctgcggagacccttctcagctccagatgcttgcaaaccgtgttcctgccatccagtaggatcagctgtccttcctgccaactcagtgaccttctgcgaccccagcaatggtgactgcccttgcaagcctggggtggcagggcgacgttgtgacaggtgcatggtgggatactggggcttcggagactatggctgtcgaccatgtgactgtgcggggagctgtgaccctatcaccggagactgcatcagcagccacacagacatagactggtgtcatgaagttcctgacttccgtcccgtgcacaataagagcgaaccagcctgggagtgggaggatgcgcaggggttttctgcacttctacactcaggtaaatgcgaatgtaaggaacagacattaggaaag

SEQ ID NO: 198 - protein, 515 aa, Homo sapiens
MGSCARLLLLWGRTVVAAGLSGVAGVSSRCEKACNPRMGNLALGRKLWADTTCGQNATELYCFYSENTDLTCRQPKCDKCNAAYPHLAHLPSAMADSSFRFPRTWWQSAEDVHREKIQLDLEAEFYFTHLIVMFKSPRPAAMVLDRSQDFGKTWKPYKYFATNCSATFGLEDDVVKKGAICTPKYSSPFPCTGGEVIFKALSPPYDTENPYSAKVQEQLKITNLRVQLLKRQSYPCQRNDLNEEPQHFTHYAIYDFIVKGSCFCNGHADQCIPVHGFRPVKAPGTFHMVHGKCMCKHNTAGSHCQHCAPLYNDRPWEAADGKTGAPNECRTRKCNGHADTCHFDVNVWEASGSRSGGVCDDCQHNTEGQYCQRCKPGFYRDLRRPFSAPDACKPCSCHPVGSAVLPANSVTFCDPSNGDCPCKPGVAGRRCDRCMVGYWGFGDYGCRPCDCAGSCDPITGDCISSHTDIDWCHEVPDFRPVHNKSEPAWEWEDAQGFSALLHSGKCECKEQTLGK

SEQ ID NO: 199 - DNA, 1545 bp, Homo sapiens
  CDS (1)..(1545)
atggggagctgcgcgcggctgctgctgctctggggccgcacggtggtggccgcaggactgagtggagtagctggagtgagttcccgctgtgaaaaagcctgcaaccctcggatgggaaatttggctttggggcgaaaactctgggcagacaccacctgcggtcagaatgctaccgaactgtactgcttctacagtgagaacacggatctgacttgtcggcagcccaaatgtgacaagtgcaatgctgcctatcctcacctggctcacctgccatctgccatggcagactcatccttccggtttcctcgcacatggtggcagtctgcggaggatgtgcacagagaaaagatccagttagacctggaagctgaattctacttcactcacctaattgtgatgttcaagtcccccaggccggctgccatggtgctggaccgctcccaggactttgggaaaacatggaagccttataagtactttgcgactaactgctccgctacatttggcctggaagatgatgttgtcaagaagggcgctatttgtactcctaaatactccagtccttttccatgcactggaggagaggttattttcaaagctttgtcaccaccatacgatacagagaacccttacagtgccaaagttcaggagcagctgaagatcaccaaccttcgcgtgcagctgctgaaacgacagtcttatccctgtcagagaaatgacctgaacgaagagcctcaacattttacacactatgcgatctatgatttcattgtcaagggcagctgcttctgcaatggccacgccgatcaatgcatacctgttcatggcttcagacctgtcaaggccccaggaacattccacatggtccatgggaagtgtatgtgtaagcacaacacagcaggcagccactgccagcactgtgccccgttatacaatgaccggccatgggaggcagctgatggcaaaacgggggctcccaacgagtgcagagcctgcaagtgtaatgggcatgctgatacctgtcacttcgacgttaatgtgtgggaggcatcagggagtcgtagtggtggtgtctgtgatgactgtcagcacaacacagaaggacagtattgccagaggtgcaagccaggcttctatcgtgacctgcggagacccttctcagctccagatgcttgcaaaccgtgttcctgccatccagtaggatcagctgtccttcctgccaactcagtgaccttctgcgaccccagcaatggtgactgcccttgcaagcctggggtggcagggcgacgttgtgacaggtgcatggtgggatactggggcttcggagactatggctgtcgaccatgtgactgtgcggggagctgtgaccctatcaccggagactgcatcagcagccacacagacatagactggtatcatgaagttcctgacttccgtcccgtgcacaataagagcgaaccagcctgggagtgggaggatgcgcaggggttttctgcacttctacactcaggtaaatgcgaatgtaaggaacagacattaggaaag

SEQ ID NO: 200 - protein, 515 aa, Homo sapiens
MGSCARLLLLWGRTVVAAGLSGVAGVSSRCEKACNPRMGNLALGRKLWADTTCGQNATELYCFYSENTDLTCRQPKCDKCNAAYPHLAHLPSAMADSSFRFPRTWWQSAEDVHREKIQLDLEAEFYFTHLIVMFKSPRPAAMVLDRSQDFGKTWKPYKYFATNCSATFGLEDDVVKKGAICTPKYSSPFPCTGGEVIFKALSPPYDTENPYSAKVQEQLKITNLRVQLLKRQSYPCQRNDLNEEPQHFTHYAIYDFIVKGSCFCNGHADQCIPVHGFRPVKAPGTFHMVHGKCMCKHNTAGSHCQHCAPLYNDRPWEAADGKTGAPNECRACKCNGHADTCHFDVNVWEASGSRSGGVCDDCQHNTEGQYCQRCKPGFYRDLRRPFSAPDACKPCSCHPVGSAVLPANSVTFCDPSNGDCPCKPGVAGRRCDRCMVGYWGFGDYGCRPCDCAGSCDPITGDCISSHTDIDWYHEVPDFRPVHNKSEPAWEWEDAQGFSALLHSGKCECKEQTLGK

SEQ ID NO: 201 - DNA, 1545 bp, Homo sapiens
  CDS (1)..(1545)
atggggagctgcgcgcggctgctgctgctctggggccgcacggtggtggccgcaggactgagtggagtagctggagtgagttcccgctgtgaaaaagcctgcaaccctcggatgggaaatttggctttggggcgaaaactctgggcagacaccacctgcggtcagaatgctaccgaactgtactgcttctacagtgagaacacggatctgacttgtcggcagcccaaatgtgacaagtgcaatgctgcctatcctcacctggctcacctgccatctgccatggcagactcatccttccggtttcctcgcacatggtggcagtctgcggaggatgtgcacagagaaaagatccagttagacctggaagctgaattctacttcactcacctaattgtgatgttcaagtcccccaggccggctgccatggtgctggaccgctcccaggactttgggaaaacatggaagccttataagtactttgcgactaactgctccgctacatttggcctggaagatgatgttgtcaagaagggcgctatttgtactcctaaatactccagtccttttccatgcactggaggagaggttattttcaaagctttgtcaccaccatacgatacagagaacccttacagtgccaaagttcaggagcagctgaagatcaccaaccttcgcgtgcagctgctgaaacgacagtcttatccctgtcagagaaatgacctgaacgaagagcctcaacattttacacactatgcgatctatgatttcattgtcaagggcagctgcttctgcaatggccacgccgatcaatgcatacctgttcatggcttcagacctgtcaaggccccaggaacattccacatggtccatgggaagtgtatgtgtaagcacaacacagcaggcagccactgccagcactgtgccccgttatacaatgaccggccatgggaggcagctgatggcaaaacgggggctcccaacgagtgcagagcccgcaagtgtaatgggcatgctgatacctgtcacttcgacgttaatgtgtgggaggcatcagggaatcgtagtggtggtgtctgtgatgactgtcagcacaacacagaaggacagtattgccagaggtgcaagccaggcttctatcgtgacctgcggagacccttctcagctccagatgcttgcaaaccgtgttcctgccatccagtaggatcagctgtccttcctgccaactcagtgaccttctgcgaccccagcaatggtgactgcccttgcaagcctggggtggcagggcgacgttgtgacaggtgcatggtgggatactggggcttcggagactatggctgtcgaccatgtgactgtgcggggagctgtgaccctatcaccggagactgcatcagcagccacacagacatagactggtatcatgaagttcctgacttccgtcccgtgcacaataagagcgaaccagcctgggagtgggaggatgcgcaggggttttctgcacttctacactcaggtaaatgcgaatgtaaggaacagacattaggaaag

SEQ ID NO: 202 - protein, 515 aa, Homo sapiens
MGSCARLLLLWGRTVVAAGLSGVAGVSSRCEKACNPRMGNLALGRKLWADTTCGQNATELYCFYSENTDLTCRQPKCDKCNAAYPHLAHLPSAMADSSFRFPRTWWQSAEDVHREKIQLDLEAEFYFTHLIVMFKSPRPAAMVLDRSQDFGKTWKPYKYFATNCSATFGLEDDVVKKGAICTPKYSSPFPCTGGEVIFKALSPPYDTENPYSAKVQEQLKITNLRVQLLKRQSYPCQRNDLNEEPQHFTHYAIYDFIVKGSCFCNGHADQCIPVHGFRPVKAPGTFHMVHGKCMCKHNTAGSHCQHCAPLYNDRPWEAADGKTGAPNECRARKCNGHADTCHFDVNVWEASGNRSGGVCDDCQHNTEGQYCQRCKPGFYRDLRRPFSAPDACKPCSCHPVGSAVLPANSVTFCDPSNGDCPCKPGVAGRRCDRCMVGYWGFGDYGCRPCDCAGSCDPITGDCISSHTDIDWYHEVPDFRPVHNKSEPAWEWEDAQGFSALLHSGKCECKEQTLGK

SEQ ID NO: 203 - DNA, 1545 bp, Homo sapiens
  CDS (1)..(1545)
atggggagctgcgcgcggctgctgctgctctggggccgcacggtggtggccgcaggactgagtggagtagctggagtgagttcccgctgtgaaaaagcctgcaaccctcggatgggaaatttggctttggggcgaaaactctgggcagacaccacctgcggtcagaatgctaccgaactgtactgcttctacagtgagaacacggatctgacttgtcggcagcccaaatgtgacaagtgcaatgctgcctatcctcacctggctcacctgccatctgccatggcagactcatccttccggtttcctcgcacatggtggcagtctgcggaggatgtgcacagagaaaagatccagttagacctggaagctgaattctacttcactcacctaattgtgatgttcaagtcccccaggccggctgccatggtgctggaccgctcccaggactttgggaaaacatggaagccttataagtactttgcgactaactgctccgctacatttggcctggaagatgatgttgtcaagaagggcgctatttgtactcctaaatactccagtccttttccatgcactggaggagaggttattttcaaagctttgtcaccaccatacgatacagagaacccttacagtgccaaagttcaggagcagctgaagatcaccaaccttcgcgtgcagctgctgaaacgacagtcttatccctgtcagagaaatgacctgaacgaagagcctcaacattttacacactatgcgatctatgatttcattgtcaagggcagctgcttctgcaatggccacgccgatcaatgcatacctgttcatggcttcagacctgtcaaggccccaggaacattccacatggtccatgggaagtgtatgtgtaagcacaacacagcaggcagccactgccagcactgtgccccgttatacaatgaccggccatgggaggcagctgatggcaaaacgggggctcccaacgagtgcagagcccgcaagtgtaatgggcatgctgatacctgtcacttcgacgttaatgtgtgggaggcatcagggagtcgtagtggtggtgtctgtgatgactgtcagcacaacacagaaggacagtattgccagaggtgcaagccaggcttctatcgtgacctgcggagacccttctcagctccagatgcttgcaaaccgtgttcctgccatccagtaggatcagctgtccttcctgccaactcagtgaccttctgcgaccccagcaatggtgactgcccttgcaagcctggggtggcagggcgacgttgtgacaggtgcatggtgggatactggggcttcggagactatggctgtcgaccatgtgactgtgcggggagctgtgaccctatcaccggagactgcatcagcagccacacagacatagactggtgtcatgaagttcctgacttccgtcccgtgcacaataagagcgaaccagcctgggagtgggaggatgcgcaggggttttctgcacttctacactcaggtaaatgcgaatgtaaggaacagacattaggaaag

SEQ ID NO: 204 - protein, 515 aa, Homo sapiens
MGSCARLLLLWGRTVVAAGLSGVAGVSSRCEKACNPRMGNLALGRKLWADTTCGQNATELYCFYSENTDLTCRQPKCDKCNAAYPHLAHLPSAMADSSFRFPRTWWQSAEDVHREKIQLDLEAEFYFTHLIVMFKSPRPAAMVLDRSQDFGKTWKPYKYFATNCSATFGLEDDVVKKGAICTPKYSSPFPCTGGEVIFKALSPPYDTENPYSAKVQEQLKITNLRVQLLKRQSYPCQRNDLNEEPQHFTHYAIYDFIVKGSCFCNGHADQCIPVHGFRPVKAPGTFHMVHGKCMCKHNTAGSHCQHCAPLYNDRPWEAADGKTGAPNECRARKCNGHADTCHFDVNVWEASGSRSGGVCDDCQHNTEGQYCQRCKPGFYRDLRRPFSAPDACKPCSCHPVGSAVLPANSVTFCDPSNGDCPCKPGVAGRRCDRCMVGYWGFGDYGCRPCDCAGSCDPITGDCISSHTDIDWCHEVPDFRPVHNKSEPAWEWEDAQGFSALLHSGKCECKEQTLGK

SEQ ID NO: 205 - DNA, 1545 bp, Homo sapiens
  CDS (1)..(1545)
atggggagctgcgcgcggctgctgctgctctggggccgcacggtggtggccgcaggactgagtggagtagctggagtgagttcccgctgtgaaaaagcctgcaaccctcggatgggaaatttggctttggggcgaaaactctgggcagacaccacctgcggtcagaatgctaccgaactgtactgcttctacagtgagaacacggatctgacttgtcggcagcccaaatgtgacaagtgcaatgctgcctatcctcacctggctcacctgccatctgccatggcagactcatccttccggtttcctcgcacatggtggcagtctgcggaggatgtgcacagagaaaagatccagttagacctggaagctgaattctacttcactcacctaattgtgatgttcaagtcccccaggccggctgccatggtgctggaccgctcccaggactttgggaaaacatggaagccttataagtactttgcgactaactgctccgctacatttggcctggaagatgatgttgtcaagaagggcgctatttgtactcctaaatactccagtccttttccatgcactggaggagaggttattttcaaagctttgtcaccaccatacgatacagagaacccttacagtgccaaagttcaggagcagctgaagatcaccaaccttcgcgtgcagctgctgaaacgacagtcttatccctgtcagagaaatgacctgaacgaagagcctcaacattttacacactatgcgatctatgatttcattgtcaagggcagctgcttctgcaatggccacgccgatcaatgcatacctgttcatggcttcagacctgtcaaggccccaggaacattccacatggtccatgggaagtgtatgtgtaagcacaacacagcaggcagccactgccagcactgtgccccgttatacaatgaccggccatgggaggcagctgatggcaaaacgggggctcccaacgagtgcagaacctgcaagtgtaatgggcatgctgatacctgtcacttcgacgttaatgtgtgggaggcatcagggaatcgtagtggtggtgtctgtgatgactgtcagcacaacacagaaggacagtattgccagaggtgcaagccaggcttctatcgtgacctgcggagacccttctcagctccagatgcttgcaaaccgtgttcctgccatccagtaggatcagctgtccttcctgccaactcagtgaccttctgcgaccccagcaatggtgactgcccttgcaagcctggggtggcagggcgacgttgtgacaggtgcatggtgggatactggggcttcggagactatggctgtcgaccatgtgactgtgcggggagctgtgaccctatcaccggagactgcatcagcagccacacagacatagactggtatcatgaagttcctgacttccgtcccgtgcacaataagagcgaaccagcctgggagtgggaggatgcgcaggggttttctgcacttctacactcaggtaaatgcgaatgtaaggaacagacattaggaaag

SEQ ID NO: 206 - protein, 515 aa, Homo sapiens
MGSCARLLLLWGRTVVAAGLSGVAGVSSRCEKACNPRMGNLALGRKLWADTTCGQNATELYCFYSENTDLTCRQPKCDKCNAAYPHLAHLPSAMADSSFRFPRTWWQSAEDVHREKIQLDLEAEFYFTHLIVMFKSPRPAAMVLDRSQDFGKTWKPYKYFATNCSATFGLEDDVVKKGAICTPKYSSPFPCTGGEVIFKALSPPYDTENPYSAKVQEQLKITNLRVQLLKRQSYPCQRNDLNEEPQHFTHYAIYDFIVKGSCFCNGHADQCIPVHGFRPVKAPGTFHMVHGKCMCKHNTAGSHCQHCAPLYNDRPWEAADGKTGAPNECRTCKCNGHADTCHFDVNVWEASGNRSGGVCDDCQHNTEGQYCQRCKPGFYRDLRRPFSAPDACKPCSCHPVGSAVLPANSVTFCDPSNGDCPCKPGVAGRRCDRCMVGYWGFGDYGCRPCDCAGSCDPITGDCISSHTDIDWYHEVPDFRPVHNKSEPAWEWEDAQGFSALLHSGKCECKEQTLGK

SEQ ID NO: 207 - DNA, 1545 bp, Homo sapiens
  CDS (1)..(1545)
atggggagctgcgcgcggctgctgctgctctggggccgcacggtggtggccgcaggactgagtggagtagctggagtgagttcccgctgtgaaaaagcctgcaaccctcggatgggaaatttggctttggggcgaaaactctgggcagacaccacctgcggtcagaatgctaccgaactgtactgcttctacagtgagaacacggatctgacttgtcggcagcccaaatgtgacaagtgcaatgctgcctatcctcacctggctcacctgccatctgccatggcagactcatccttccggtttcctcgcacatggtggcagtctgcggaggatgtgcacagagaaaagatccagttagacctggaagctgaattctacttcactcacctaattgtgatgttcaagtcccccaggccggctgccatggtgctggaccgctcccaggactttgggaaaacatggaagccttataagtactttgcgactaactgctccgctacatttggcctggaagatgatgttgtcaagaagggcgctatttgtactcctaaatactccagtccttttccatgcactggaggagaggttattttcaaagctttgtcaccaccatacgatacagagaacccttacagtgccaaagttcaggagcagctgaagatcaccaaccttcgcgtgcagctgctgaaacgacagtcttatccctgtcagagaaatgacctgaacgaagagcctcaacattttacacactatgcgatctatgatttcattgtcaagggcagctgcttctgcaatggccacgccgatcaatgcatacctgttcatggcttcagacctgtcaaggccccaggaacattccacatggtccatgggaagtgtatgtgtaagcacaacacagcaggcagccactgccagcactgtgccccgttatacaatgaccggccatgggaggcagctgatggcaaaacgggggctcccaacgagtgcagaacctgcaagtgtaatgggcatgctgatacctgtcacttcgacgttaatgtgtgggaggcatcagggagtcgtagtggtggtgtctgtgatgactgtcagcacaacacagaaggacagtattgccagaggtgcaagccaggcttctatcgtgacctgcggagacccttctcagctccagatgcttgcaaaccgtgttcctgccatccagtaggatcagctgtccttcctgccaactcagtgaccttctgcgaccccagcaatggtgactgcccttgcaagcctggggtggcagggcgacgttgtgacaggtgcatggtgggatactggggcttcggagactatggctgtcgaccatgtgactgtgcggggagctgtgaccctatcaccggagactgcatcagcagccacacagacatagactggtgtcatgaagttcctgacttccgtcccgtgcacaataagagcgaaccagcctgggagtgggaggatgcgcaggggttttctgcacttctacactcaggtaaatgcgaatgtaaggaacagacattaggaaag

SEQ ID NO: 208 - protein, 515 aa, Homo sapiens
MGSCARLLLLWGRTVVAAGLSGVAGVSSRCEKACNPRMGNLALGRKLWADTTCGQNATELYCFYSENTDLTCRQPKCDKCNAAYPHLAHLPSAMADSSFRFPRTWWQSAEDVHREKIQLDLEAEFYFTHLIVMFKSPRPAAMVLDRSQDFGKTWKPYKYFATNCSATFGLEDDVVKKGAICTPKYSSPFPCTGGEVIFKALSPPYDTENPYSAKVQEQLKITNLRVQLLKRQSYPCQRNDLNEEPQHFTHYAIYDFIVKGSCFCNGHADQCIPVHGFRPVKAPGTFHMVHGKCMCKHNTAGSHCQHCAPLYNDRPWEAADGKTGAPNECRTCKCNGHADTCHFDVNVWEASGSRSGGVCDDCQHNTEGQYCQRCKPGFYRDLRRPFSAPDACKPCSCHPVGSAVLPANSVTFCDPSNGDCPCKPGVAGRRCDRCMVGYWGFGDYGCRPCDCAGSCDPITGDCISSHTDIDWCHEVPDFRPVHNKSEPAWEWEDAQGFSALLHSGKCECKEQTLGK

SEQ ID NO: 209 - DNA, 1545 bp, Homo sapiens
  CDS (1)..(1545)
atggggagctgcgcgcggctgctgctgctctggggccgcacggtggtggccgcaggactgagtggagtagctggagtgagttcccgctgtgaaaaagcctgcaaccctcggatgggaaatttggctttggggcgaaaactctgggcagacaccacctgcggtcagaatgctaccgaactgtactgcttctacagtgagaacacggatctgacttgtcggcagcccaaatgtgacaagtgcaatgctgcctatcctcacctggctcacctgccatctgccatggcagactcatccttccggtttcctcgcacatggtggcagtctgcggaggatgtgcacagagaaaagatccagttagacctggaagctgaattctacttcactcacctaattgtgatgttcaagtcccccaggccggctgccatggtgctggaccgctcccaggactttgggaaaacatggaagccttataagtactttgcgactaactgctccgctacatttggcctggaagatgatgttgtcaagaagggcgctatttgtactcctaaatactccagtccttttccatgcactggaggagaggttattttcaaagctttgtcaccaccatacgatacagagaacccttacagtgccaaagttcaggagcagctgaagatcaccaaccttcgcgtgcagctgctgaaacgacagtcttatccctgtcagagaaatgacctgaacgaagagcctcaacattttacacactatgcgatctatgatttcattgtcaagggcagctgcttctgcaatggccacgccgatcaatgcatacctgttcatggcttcagacctgtcaaggccccaggaacattccacatggtccatgggaagtgtatgtgtaagcacaacacagcaggcagccactgccagcactgtgccccgttatacaatgaccggccatgggaggcagctgatggcaaaacgggggctcccaacgagtgcagaacccgcaagtgtaatgggcatgctgatacctgtcacttcgacgttaatgtgtgggaggcatcagggaatcgtagtggtggtgtctgtgatgactgtcagcacaacacagaaggacagtattgccagaggtgcaagccaggcttctatcgtgacctgcggagacccttctcagctccagatgcttgcaaaccgtgttcctgccatccagtaggatcagctgtccttcctgccaactcagtgaccttctgcgaccccagcaatggtgactgcccttgcaagcctggggtggcagggcgacgttgtgacaggtgcatggtgggatactggggcttcggagactatggctgtcgaccatgtgactgtgcggggagctgtgaccctatcaccggagactgcatcagcagccacacagacatagactggtgtcatgaagttcctgacttccgtcccgtgcacaataagagcgaaccagcctgggagtgggaggatgcgcaggggttttctgcacttctacactcaggtaaatgcgaatgtaaggaacagacattaggaaag

SEQ ID NO: 210 - protein, 515 aa, Homo sapiens
MGSCARLLLLWGRTVVAAGLSGVAGVSSRCEKACNPRMGNLALGRKLWADTTCGQNATELYCFYSENTDLTCRQPKCDKCNAAYPHLAHLPSAMADSSFRFPRTWWQSAEDVHREKIQLDLEAEFYFTHLIVMFKSPRPAAMVLDRSQDFGKTWKPYKYFATNCSATFGLEDDVVKKGAICTPKYSSPFPCTGGEVIFKALSPPYDTENPYSAKVQEQLKITNLRVQLLKRQSYPCQRNDLNEEPQHFTHYAIYDFIVKGSCFCNGHADQCIPVHGFRPVKAPGTFHMVHGKCMCKHNTAGSHCQHCAPLYNDRPWEAADGKTGAPNECRTRKCNGHADTCHFDVNVWEASGNRSGGVCDDCQHNTEGQYCQRCKPGFYRDLRRPFSAPDACKPCSCHPVGSAVLPANSVTFCDPSNGDCPCKPGVAGRRCDRCMVGYWGFGDYGCRPCDCAGSCDPITGDCISSHTDIDWCHEVPDFRPVHNKSEPAWEWEDAQGFSALLHSGKCECKEQTLGK

SEQ ID NO: 211 - DNA, 1545 bp, Homo sapiens
  CDS (1)..(1545)
atggggagctgcgcgcggctgctgctgctctggggccgcacggtggtggccgcaggactgagtggagtagctggagtgagttcccgctgtgaaaaagcctgcaaccctcggatgggaaatttggctttggggcgaaaactctgggcagacaccacctgcggtcagaatgctaccgaactgtactgcttctacagtgagaacacggatctgacttgtcggcagcccaaatgtgacaagtgcaatgctgcctatcctcacctggctcacctgccatctgccatggcagactcatccttccggtttcctcgcacatggtggcagtctgcggaggatgtgcacagagaaaagatccagttagacctggaagctgaattctacttcactcacctaattgtgatgttcaagtcccccaggccggctgccatggtgctggaccgctcccaggactttgggaaaacatggaagccttataagtactttgcgactaactgctccgctacatttggcctggaagatgatgttgtcaagaagggcgctatttgtactcctaaatactccagtccttttccatgcactggaggagaggttattttcaaagctttgtcaccaccatacgatacagagaacccttacagtgccaaagttcaggagcagctgaagatcaccaaccttcgcgtgcagctgctgaaacgacagtcttatccctgtcagagaaatgacctgaacgaagagcctcaacattttacacactatgcgatctatgatttcattgtcaagggcagctgcttctgcaatggccacgccgatcaatgcatacctgttcatggcttcagacctgtcaaggccccaggaacattccacatggtccatgggaagtgtatgtgtaagcacaacacagcaggcagccactgccagcactgtgccccgttatacaatgaccggccatgggaggcagctgatggcaaaacgggggctcccaacgagtgcagagcctgcaagtgtaatgggcatgctgatacctgtcacttcgacgttaatgtgtgggaggcatcagggaatcgtagtggtggtgtctgtgatgactgtcagcacaacacagaaggacagtattgccagaggtgcaagccaggcttctatcgtgacctgcggagacccttctcagctccagatgcttgcaaaccgtgttcctgccatccagtaggatcagctgtccttcctgccaactcagtgaccttctgcgaccccagcaatggtgactgcccttgcaagcctggggtggcagggcgacgttgtgacaggtgcatggtgggatactggggcttcggagactatggctgtcgaccatgtgactgtgcggggagctgtgaccctatcaccggagactgcatcagcagccacacagacatagactggtatcatgaagttcctgacttccgtcccgtgcacaataagagcgaaccagcctgggagtgggaggatgcgcaggggttttctgcacttctacactcaggtaaatgcgaatgtaaggaacagacattaggaaag

SEQ ID NO: 212 - protein, 515 aa, Homo sapiens
MGSCARLLLLWGRTVVAAGLSGVAGVSSRCEKACNPRMGNLALGRKLWADTTCGQNATELYCFYSENTDLTCRQPKCDKCNAAYPHLAHLPSAMADSSFRFPRTWWQSAEDVHREKIQLDLEAEFYFTHLIVMFKSPRPAAMVLDRSQDFGKTWKPYKYFATNCSATFGLEDDVVKKGAICTPKYSSPFPCTGGEVIFKALSPPYDTENPYSAKVQEQLKITNLRVQLLKRQSYPCQRNDLNEEPQHFTHYAIYDFIVKGSCFCNGHADQCIPVHGFRPVKAPGTFHMVHGKCMCKHNTAGSHCQHCAPLYNDRPWEAADGKTGAPNECRACKCNGHADTCHFDVNVWEASGNRSGGVCDDCQHNTEGQYCQRCKPGFYRDLRRPFSAPDACKPCSCHPVGSAVLPANSVTFCDPSNGDCPCKPGVAGRRCDRCMVGYWGFGDYGCRPCDCAGSCDPITGDCISSHTDIDWYHEVPDFRPVHNKSEPAWEWEDAQGFSALLHSGKCECKEQTLGK

SEQ ID NO: 213 - DNA, 1545 bp, Homo sapiens
  CDS (1)..(1545)
atggggagctgcgcgcggctgctgctgctctggggccgcacggtggtggccgcaggactgagtggagtagctggagtgagttcccgctgtgaaaaagcctgcaaccctcggatgggaaatttggctttggggcgaaaactctgggcagacaccacctgcggtcagaatgctaccgaactgtactgcttctacagtgagaacacggatctgacttgtcggcagcccaaatgtgacaagtgcaatgctgcctatcctcacctggctcacctgccatctgccatggcagactcatccttccggtttcctcgcacatggtggcagtctgcggaggatgtgcacagagaaaagatccagttagacctggaagctgaattctacttcactcacctaattgtgatgttcaagtcccccaggccggctgccatggtgctggaccgctcccaggactttgggaaaacatggaagccttataagtactttgcgactaactgctccgctacatttggcctggaagatgatgttgtcaagaagggcgctatttgtactcctaaatactccagtccttttccatgcactggaggagaggttattttcaaagctttgtcaccaccatacgatacagagaacccttacagtgccaaagttcaggagcagctgaagatcaccaaccttcgcgtgcagctgctgaaacgacagtcttatccctgtcagagaaatgacctgaacgaagagcctcaacattttacacactatgcgatctatgatttcattgtcaagggcagctgcttctgcaatggccacgccgatcaatgcatacctgttcatggcttcagacctgtcaaggccccaggaacattccacatggtccatgggaagtgtatgtgtaagcacaacacagcaggcagccactgccagcactgtgccccgttatacaatgaccggccatgggaggcagctgatggcaaaacgggggctcccaacgagtgcagagcctgcaagtgtaatgggcatgctgatacctgtcacttcgacgttaatgtgtgggaggcatcagggagtcgtagtggtggtgtctgtgatgactgtcagcacaacacagaaggacagtattgccagaggtgcaagccaggcttctatcgtgacctgcggagacccttctcagctccagatgcttgcaaaccgtgttcctgccatccagtaggatcagctgtccttcctgccaactcagtgaccttctgcgaccccagcaatggtgactgcccttgcaagcctggggtggcagggcgacgttgtgacaggtgcatggtgggatactggggcttcggagactatggctgtcgaccatgtgactgtgcggggagctgtgaccctatcaccggagactgcatcagcagccacacagacatagactggtgtcatgaagttcctgacttccgtcccgtgcacaataagagcgaaccagcctgggagtgggaggatgcgcaggggttttctgcacttctacactcaggtaaatgcgaatgtaaggaacagacattaggaaag

SEQ ID NO: 214 - protein, 515 aa, Homo sapiens
MGSCARLLLLWGRTVVAAGLSGVAGVSSRCEKACNPRMGNLALGRKLWADTTCGQNATELYCFYSENTDLTCRQPKCDKCNAAYPHLAHLPSAMADSSFRFPRTWWQSAEDVHREKIQLDLEAEFYFTHLIVMFKSPRPAAMVLDRSQDFGKTWKPYKYFATNCSATFGLEDDVVKKGAICTPKYSSPFPCTGGEVIFKALSPPYDTENPYSAKVQEQLKITNLRVQLLKRQSYPCQRNDLNEEPQHFTHYAIYDFIVKGSCFCNGHADQCIPVHGFRPVKAPGTFHMVHGKCMCKHNTAGSHCQHCAPLYNDRPWEAADGKTGAPNECRACKCNGHADTCHFDVNVWEASGSRSGGVCDDCQHNTEGQYCQRCKPGFYRDLRRPFSAPDACKPCSCHPVGSAVLPANSVTFCDPSNGDCPCKPGVAGRRCDRCMVGYWGFGDYGCRPCDCAGSCDPITGDCISSHTDIDWCHEVPDFRPVHNKSEPAWEWEDAQGFSALLHSGKCECKEQTLGK

SEQ ID NO: 215 - DNA, 1545 bp, Homo sapiens
  CDS (1)..(1545)
atggggagctgcgcgcggctgctgctgctctggggccgcacggtggtggccgcaggactgagtggagtagctggagtgagttcccgctgtgaaaaagcctgcaaccctcggatgggaaatttggctttggggcgaaaactctgggcagacaccacctgcggtcagaatgctaccgaactgtactgcttctacagtgagaacacggatctgacttgtcggcagcccaaatgtgacaagtgcaatgctgcctatcctcacctggctcacctgccatctgccatggcagactcatccttccggtttcctcgcacatggtggcagtctgcggaggatgtgcacagagaaaagatccagttagacctggaagctgaattctacttcactcacctaattgtgatgttcaagtcccccaggccggctgccatggtgctggaccgctcccaggactttgggaaaacatggaagccttataagtactttgcgactaactgctccgctacatttggcctggaagatgatgttgtcaagaagggcgctatttgtactcctaaatactccagtccttttccatgcactggaggagaggttattttcaaagctttgtcaccaccatacgatacagagaacccttacagtgccaaagttcaggagcagctgaagatcaccaaccttcgcgtgcagctgctgaaacgacagtcttatccctgtcagagaaatgacctgaacgaagagcctcaacattttacacactatgcgatctatgatttcattgtcaagggcagctgcttctgcaatggccacgccgatcaatgcatacctgttcatggcttcagacctgtcaaggccccaggaacattccacatggtccatgggaagtgtatgtgtaagcacaacacagcaggcagccactgccagcactgtgccccgttatacaatgaccggccatgggaggcagctgatggcaaaacgggggctcccaacgagtgcagagcccgcaagtgtaatgggcatgctgatacctgtcacttcgacgttaatgtgtgggaggcatcagggaatcgtagtggtggtgtctgtgatgactgtcagcacaacacagaaggacagtattgccagaggtgcaagccaggcttctatcgtgacctgcggagacccttctcagctccagatgcttgcaaaccgtgttcctgccatccagtaggatcagctgtccttcctgccaactcagtgaccttctgcgaccccagcaatggtgactgcccttgcaagcctggggtggcagggcgacgttgtgacaggtgcatggtgggatactggggcttcggagactatggctgtcgaccatgtgactgtgcggggagctgtgaccctatcaccggagactgcatcagcagccacacagacatagactggtgtcatgaagttcctgacttccgtcccgtgcacaataagagcgaaccagcctgggagtgggaggatgcgcaggggttttctgcacttctacactcaggtaaatgcgaatgtaaggaacagacattaggaaag

SEQ ID NO: 216 - protein, 515 aa, Homo sapiens
MGSCARLLLLWGRTVVAAGLSGVAGVSSRCEKACNPRMGNLALGRKLWADTTCGQNATELYCFYSENTDLTCRQPKCDKCNAAYPHLAHLPSAMADSSFRFPRTWWQSAEDVHREKIQLDLEAEFYFTHLIVMFKSPRPAAMVLDRSQDFGKTWKPYKYFATNCSATFGLEDDVVKKGAICTPKYSSPFPCTGGEVIFKALSPPYDTENPYSAKVQEQLKITNLRVQLLKRQSYPCQRNDLNEEPQHFTHYAIYDFIVKGSCFCNGHADQCIPVHGFRPVKAPGTFHMVHGKCMCKHNTAGSHCQHCAPLYNDRPWEAADGKTGAPNECRARKCNGHADTCHFDVNVWEASGNRSGGVCDDCQHNTEGQYCQRCKPGFYRDLRRPFSAPDACKPCSCHPVGSAVLPANSVTFCDPSNGDCPCKPGVAGRRCDRCMVGYWGFGDYGCRPCDCAGSCDPITGDCISSHTDIDWCHEVPDFRPVHNKSEPAWEWEDAQGFSALLHSGKCECKEQTLGK

SEQ ID NO: 217 - DNA, 1545 bp, Homo sapiens
  CDS (1)..(1545)
atggggagctgcgcgcggctgctgctgctctggggccgcacggtggtggccgcaggactgagtggagtagctggagtgagttcccgctgtgaaaaagcctgcaaccctcggatgggaaatttggctttggggcgaaaactctgggcagacaccacctgcggtcagaatgctaccgaactgtactgcttctacagtgagaacacggatctgacttgtcggcagcccaaatgtgacaagtgcaatgctgcctatcctcacctggctcacctgccatctgccatggcagactcatccttccggtttcctcgcacatggtggcagtctgcggaggatgtgcacagagaaaagatccagttagacctggaagctgaattctacttcactcacctaattgtgatgttcaagtcccccaggccggctgccatggtgctggaccgctcccaggactttgggaaaacatggaagccttataagtactttgcgactaactgctccgctacatttggcctggaagatgatgttgtcaagaagggcgctatttgtactcctaaatactccagtccttttccatgcactggaggagaggttattttcaaagctttgtcaccaccatacgatacagagaacccttacagtgccaaagttcaggagcagctgaagatcaccaaccttcgcgtgcagctgctgaaacgacagtcttatccctgtcagagaaatgacctgaacgaagagcctcaacattttacacactatgcgatctatgatttcattgtcaagggcagctgcttctgcaatggccacgccgatcaatgcatacctgttcatggcttcagacctgtcaaggccccaggaacattccacatggtccatgggaagtgtatgtgtaagcacaacacagcaggcagccactgccagcactgtgccccgttatacaatgaccggccatgggaggcagctgatggcaaaacgggggctcccaacgagtgcagaacctgcaagtgtaatgggcatgctgatacctgtcacttcgacgttaatgtgtgggaggcatcagggaatcgtagtggtggtgtctgtgatgactgtcagcacaacacagaaggacagtattgccagaggtgcaagccaggcttctatcgtgacctgcggagacccttctcagctccagatgcttgcaaaccgtgttcctgccatccagtaggatcagctgtccttcctgccaactcagtgaccttctgcgaccccagcaatggtgactgcccttgcaagcctggggtggcagggcgacgttgtgacaggtgcatggtgggatactggggcttcggagactatggctgtcgaccatgtgactgtgcggggagctgtgaccctatcaccggagactgcatcagcagccacacagacatagactggtgtcatgaagttcctgacttccgtcccgtgcacaataagagcgaaccagcctgggagtgggaggatgcgcaggggttttctgcacttctacactcaggtaaatgcgaatgtaaggaacagacattaggaaag

SEQ ID NO: 218 - protein, 515 aa, Homo sapiens
MGSCARLLLLWGRTVVAAGLSGVAGVSSRCEKACNPRMGNLALGRKLWADTTCGQNATELYCFYSENTDLTCRQPKCDKCNAAYPHLAHLPSAMADSSFRFPRTWWQSAEDVHREKIQLDLEAEFYFTHLIVMFKSPRPAAMVLDRSQDFGKTWKPYKYFATNCSATFGLEDDVVKKGAICTPKYSSPFPCTGGEVIFKALSPPYDTENPYSAKVQEQLKITNLRVQLLKRQSYPCQRNDLNEEPQHFTHYAIYDFIVKGSCFCNGHADQCIPVHGFRPVKAPGTFHMVHGKCMCKHNTAGSHCQHCAPLYNDRPWEAADGKTGAPNECRTCKCNGHADTCHFDVNVWEASGNRSGGVCDDCQHNTEGQYCQRCKPGFYRDLRRPFSAPDACKPCSCHPVGSAVLPANSVTFCDPSNGDCPCKPGVAGRRCDRCMVGYWGFGDYGCRPCDCAGSCDPITGDCISSHTDIDWCHEVPDFRPVHNKSEPAWEWEDAQGFSALLHSGKCECKEQTLGK

SEQ ID NO: 219 - DNA, 1545 bp, Homo sapiens
  CDS (1)..(1545)
atggggagctgcgcgcggctgctgctgctctggggccgcacggtggtggccgcaggactgagtggagtagctggagtgagttcccgctgtgaaaaagcctgcaaccctcggatgggaaatttggctttggggcgaaaactctgggcagacaccacctgcggtcagaatgctaccgaactgtactgcttctacagtgagaacacggatctgacttgtcggcagcccaaatgtgacaagtgcaatgctgcctatcctcacctggctcacctgccatctgccatggcagactcatccttccggtttcctcgcacatggtggcagtctgcggaggatgtgcacagagaaaagatccagttagacctggaagctgaattctacttcactcacctaattgtgatgttcaagtcccccaggccggctgccatggtgctggaccgctcccaggactttgggaaaacatggaagccttataagtactttgcgactaactgctccgctacatttggcctggaagatgatgttgtcaagaagggcgctatttgtactcctaaatactccagtccttttccatgcactggaggagaggttattttcaaagctttgtcaccaccatacgatacagagaacccttacagtgccaaagttcaggagcagctgaagatcaccaaccttcgcgtgcagctgctgaaacgacagtcttatccctgtcagagaaatgacctgaacgaagagcctcaacattttacacactatgcgatctatgatttcattgtcaagggcagctgcttctgcaatggccacgccgatcaatgcatacctgttcatggcttcagacctgtcaaggccccaggaacattccacatggtccatgggaagtgtatgtgtaagcacaacacagcaggcagccactgccagcactgtgccccgttatacaatgaccggccatgggaggcagctgatggcaaaacgggggctcccaacgagtgcagagcctgcaagtgtaatgggcatgctgatacctgtcacttcgacgttaatgtgtgggaggcatcagggaatcgtagtggtggtgtctgtgatgactgtcagcacaacacagaaggacagtattgccagaggtgcaagccaggcttctatcgtgacctgcggagacccttctcagctccagatgcttgcaaaccgtgttcctgccatccagtaggatcagctgtccttcctgccaactcagtgaccttctgcgaccccagcaatggtgactgcccttgcaagcctggggtggcagggcgacgttgtgacaggtgcatggtgggatactggggcttcggagactatggctgtcgaccatgtgactgtgcggggagctgtgaccctatcaccggagactgcatcagcagccacacagacatagactggtgtcatgaagttcctgacttccgtcccgtgcacaataagagcgaaccagcctgggagtgggaggatgcgcaggggttttctgcacttctacactcaggtaaatgcgaatgtaaggaacagacattaggaaag

SEQ ID NO: 220 - protein, 515 aa, Homo sapiens
MGSCARLLLLWGRTVVAAGLSGVAGVSSRCEKACNPRMGNLALGRKLWADTTCGQNATELYCFYSENTDLTCRQPKCDKCNAAYPHLAHLPSAMADSSFRFPRTWWQSAEDVHREKIQLDLEAEFYFTHLIVMFKSPRPAAMVLDRSQDFGKTWKPYKYFATNCSATFGLEDDVVKKGAICTPKYSSPFPCTGGEVIFKALSPPYDTENPYSAKVQEQLKITNLRVQLLKRQSYPCQRNDLNEEPQHFTHYAIYDFIVKGSCFCNGHADQCIPVHGFRPVKAPGTFHMVHGKCMCKHNTAGSHCQHCAPLYNDRPWEAADGKTGAPNECRACKCNGHADTCHFDVNVWEASGNRSGGVCDDCQHNTEGQYCQRCKPGFYRDLRRPFSAPDACKPCSCHPVGSAVLPANSVTFCDPSNGDCPCKPGVAGRRCDRCMVGYWGFGDYGCRPCDCAGSCDPITGDCISSHTDIDWCHEVPDFRPVHNKSEPAWEWEDAQGFSALLHSGKCECKEQTLGK

SEQ ID NO: 221 - DNA, 1545 bp, Homo sapiens
  CDS (1)..(1545)
atggggagctgcgcgcggctgctgctgctctggggctgcacggtggtggccgcaggactgagtggagtagctggagtgagttcccgctgtgaaaaagcctgcaaccctcggatgggaaatttggctttggggcgaaaactctgggcagacaccacctgcggtcagaatgctaccgaactgtactgcttctacagtgagaacacggatctgacttgtcggcagcccaaatgtgacaagtgcaatgctgcctatcctcacctggctcacctgccatctgccatggcagactcatccttccggtttcctcgcacatggtggcagtctgcggaggatgtgcacagagaaaagatccagttagacctggaagctgaattctacttcactcacctaattgtgatgttcaagtcccccaggccggctgccatggtgctggaccgctcccaggactttgggaaaacatggaagccttataagtactttgcgactaactgctccgctacatttggcctggaagatgatgttgtcaagaagggcgctatttgtactcctaaatactccagtccttttccatgcactggaggagaggttattttcaaagctttgtcaccaccatacgatacagagaacccttacagtgccaaagttcaggagcagctgaagatcaccaaccttcgcgtgcagctgctgaaacgacagtcttatccctgtcagagaaatgacctgaacgaagagcctcaacattttacacactatgcgatctatgatttcattgtcaagggcagctgcttctgcaatggccacgccgatcaatgcatacctgttcatggcttcagacctgtcaaggccccaggaacattccacatggtccatgggaagtgtatgtgtaagcacaacacagcaggcagccactgccagcactgtgccccgttatacaatgaccggccatgggaggcagctgatggcaaaacgggggctcccaacgagtgcagaacccgcaagtgtaatgggcatgctgatacctgtcacttcgacgttaatgtgtgggaggcatcagggaatcgtagtggtggtgtctgtgatgactgtcagcacaacacagaaggacagtattgccagaggtgcaagccaggcttctatcgtgacctgcggagacccttctcagctccagatgcttgcaaaccgtgttcctgccatccagtaggatcagctgtccttcctgccaactcagtgaccttctgcgaccccagcaatggtgactgcccttgcaagcctggggtggcagggcgacgttgtgacaggtgcatggtgggatactggggcttcggagactatggctgtcgaccatgtgactgtgcggggagctgtgaccctatcaccggagactgcatcagcagccacacagacatagactggtatcatgaagttcctgacttccgtcccgtgcacaataagagcgaaccagcctgggagtgggaggatgcgcaggggttttctgcacttctacactcaggtaaatgcgaatgtaaggaacagacattaggaaag

SEQ ID NO: 222 - protein, 515 aa, Homo sapiens
MGSCARLLLLWGCTVVAAGLSGVAGVSSRCEKACNPRMGNLALGRKLWADTTCGQNATELYCFYSENTDLTCRQPKCDKCNAAYPHLAHLPSAMADSSFRFPRTWWQSAEDVHREKIQLDLEAEFYFTHLIVMFKSPRPAAMVLDRSQDFGKTWKPYKYFATNCSATFGLEDDVVKKGAICTPKYSSPFPCTGGEVIFKALSPPYDTENPYSAKVQEQLKITNLRVQLLKRQSYPCQRNDLNEEPQHFTHYAIYDFIVKGSCFCNGHADQCIPVHGFRPVKAPGTFHMVHGKCMCKHNTAGSHCQHCAPLYNDRPWEAADGKTGAPNECRTRKCNGHADTCHFDVNVWEASGNRSGGVCDDCQHNTEGQYCQRCKPGFYRDLRRPFSAPDACKPCSCHPVGSAVLPANSVTFCDPSNGDCPCKPGVAGRRCDRCMVGYWGFGDYGCRPCDCAGSCDPITGDCISSHTDIDWYHEVPDFRPVHNKSEPAWEWEDAQGFSALLHSGKCECKEQTLGK

SEQ ID NO: 223 - DNA, 1545 bp, Homo sapiens
  CDS (1)..(1545)
atggggagctgcgcgcggctgctgctgctctggggctgcacggtggtggccgcaggactgagtggagtagctggagtgagttcccgctgtgaaaaagcctgcaaccctcggatgggaaatttggctttggggcgaaaactctgggcagacaccacctgcggtcagaatgctaccgaactgtactgcttctacagtgagaacacggatctgacttgtcggcagcccaaatgtgacaagtgcaatgctgcctatcctcacctggctcacctgccatctgccatggcagactcatccttccggtttcctcgcacatggtggcagtctgcggaggatgtgcacagagaaaagatccagttagacctggaagctgaattctacttcactcacctaattgtgatgttcaagtcccccaggccggctgccatggtgctggaccgctcccaggactttgggaaaacatggaagccttataagtactttgcgactaactgctccgctacatttggcctggaagatgatgttgtcaagaagggcgctatttgtactcctaaatactccagtccttttccatgcactggaggagaggttattttcaaagctttgtcaccaccatacgatacagagaacccttacagtgccaaagttcaggagcagctgaagatcaccaaccttcgcgtgcagctgctgaaacgacagtcttatccctgtcagagaaatgacctgaacgaagagcctcaacattttacacactatgcgatctatgatttcattgtcaagggcagctgcttctgcaatggccacgccgatcaatgcatacctgttcatggcttcagacctgtcaaggccccaggaacattccacatggtccatgggaagtgtatgtgtaagcacaacacagcaggcagccactgccagcactgtgccccgttatacaatgaccggccatgggaggcagctgatggcaaaacgggggctcccaacgagtgcagagcccgcaagtgtaatgggcatgctgatacctgtcacttcgacgttaatgtgtgggaggcatcagggaatcgtagtggtggtgtctgtgatgactgtcagcacaacacagaaggacagtattgccagaggtgcaagccaggcttctatcgtgacctgcggagacccttctcagctccagatgcttgcaaaccgtgttcctgccatccagtaggatcagctgtccttcctgccaactcagtgaccttctgcgaccccagcaatggtgactgcccttgcaagcctggggtggcagggcgacgttgtgacaggtgcatggtgggatactggggcttcggagactatggctgtcgaccatgtgactgtgcggggagctgtgaccctatcaccggagactgcatcagcagccacacagacatagactggtatcatgaagttcctgacttccgtcccgtgcacaataagagcgaaccagcctgggagtgggaggatgcgcaggggttttctgcacttctacactcaggtaaatgcgaatgtaaggaacagacattaggaaag

SEQ ID NO: 224 - protein, 515 aa, Homo sapiens
MGSCARLLLLWGCTVVAAGLSGVAGVSSRCEKACNPRMGNLALGRKLWADTTCGQNATELYCFYSENTDLTCRQPKCDKCNAAYPHLAHLPSAMADSSFRFPRTWWQSAEDVHREKIQLDLEAEFYFTHLIVMFKSPRPAAMVLDRSQDFGKTWKPYKYFATNCSATFGLEDDVVKKGAICTPKYSSPFPCTGGEVIFKALSPPYDTENPYSAKVQEQLKITNLRVQLLKRQSYPCQRNDLNEEPQHFTHYAIYDFIVKGSCFCNGHADQCIPVHGFRPVKAPGTFHMVHGKCMCKHNTAGSHCQHCAPLYNDRPWEAADGKTGAPNECRARKCNGHADTCHFDVNVWEASGNRSGGVCDDCQHNTEGQYCQRCKPGFYRDLRRPFSAPDACKPCSCHPVGSAVLPANSVTFCDPSNGDCPCKPGVAGRRCDRCMVGYWGFGDYGCRPCDCAGSCDPITGDCISSHTDIDWYHEVPDFRPVHNKSEPAWEWEDAQGFSALLHSGKCECKEQTLGK

SEQ ID NO: 225 - DNA, 1545 bp, Homo sapiens
  CDS (1)..(1545)
atggggagctgcgcgcggctgctgctgctctggggctgcacggtggtggccgcaggactgagtggagtagctggagtgagttcccgctgtgaaaaagcctgcaaccctcggatgggaaatttggctttggggcgaaaactctgggcagacaccacctgcggtcagaatgctaccgaactgtactgcttctacagtgagaacacggatctgacttgtcggcagcccaaatgtgacaagtgcaatgctgcctatcctcacctggctcacctgccatctgccatggcagactcatccttccggtttcctcgcacatggtggcagtctgcggaggatgtgcacagagaaaagatccagttagacctggaagctgaattctacttcactcacctaattgtgatgttcaagtcccccaggccggctgccatggtgctggaccgctcccaggactttgggaaaacatggaagccttataagtactttgcgactaactgctccgctacatttggcctggaagatgatgttgtcaagaagggcgctatttgtactcctaaatactccagtccttttccatgcactggaggagaggttattttcaaagctttgtcaccaccatacgatacagagaacccttacagtgccaaagttcaggagcagctgaagatcaccaaccttcgcgtgcagctgctgaaacgacagtcttatccctgtcagagaaatgacctgaacgaagagcctcaacattttacacactatgcgatctatgatttcattgtcaagggcagctgcttctgcaatggccacgccgatcaatgcatacctgttcatggcttcagacctgtcaaggccccaggaacattccacatggtccatgggaagtgtatgtgtaagcacaacacagcaggcagccactgccagcactgtgccccgttatacaatgaccggccatgggaggcagctgatggcaaaacgggggctcccaacgagtgcagagcccgcaagtgtaatgggcatgctgatacctgtcacttcgacgttaatgtgtgggaggcatcagggagtcgtagtggtggtgtctgtgatgactgtcagcacaacacagaaggacagtattgccagaggtgcaagccaggcttctatcgtgacctgcggagacccttctcagctccagatgcttgcaaaccgtgttcctgccatccagtaggatcagctgtccttcctgccaactcagtgaccttctgcgaccccagcaatggtgactgcccttgcaagcctggggtggcagggcgacgttgtgacaggtgcatggtgggatactggggcttcggagactatggctgtcgaccatgtgactgtgcggggagctgtgaccctatcaccggagactgcatcagcagccacacagacatagactggtgtcatgaagttcctgacttccgtcccgtgcacaataagagcgaaccagcctgggagtgggaggatgcgcaggggttttctgcacttctacactcaggtaaatgcgaatgtaaggaacagacattaggaaag

SEQ ID NO: 226 - protein, 515 aa, Homo sapiens
MGSCARLLLLWGCTVVAAGLSGVAGVSSRCEKACNPRMGNLALGRKLWADTTCGQNATELYCFYSENTDLTCRQPKCDKCNAAYPHLAHLPSAMADSSFRFPRTWWQSAEDVHREKIQLDLEAEFYFTHLIVMFKSPRPAAMVLDRSQDFGKTWKPYKYFATNCSATFGLEDDVVKKGAICTPKYSSPFPCTGGEVIFKALSPPYDTENPYSAKVQEQLKITNLRVQLLKRQSYPCQRNDLNEEPQHFTHYAIYDFIVKGSCFCNGHADQCIPVHGFRPVKAPGTFHMVHGKCMCKHNTAGSHCQHCAPLYNDRPWEAADGKTGAPNECRARKCNGHADTCHFDVNVWEASGSRSGGVCDDCQHNTEGQYCQRCKPGFYRDLRRPFSAPDACKPCSCHPVGSAVLPANSVTFCDPSNGDCPCKPGVAGRRCDRCMVGYWGFGDYGCRPCDCAGSCDPITGDCISSHTDIDWCHEVPDFRPVHNKSEPAWEWEDAQGFSALLHSGKCECKEQTLGK

SEQ ID NO: 227 - DNA, 1545 bp, Homo sapiens
  CDS (1)..(1545)
atggggagctgcgcgcggctgctgctgctctggggctgcacggtggtggccgcaggactgagtggagtagctggagtgagttcccgctgtgaaaaagcctgcaaccctcggatgggaaatttggctttggggcgaaaactctgggcagacaccacctgcggtcagaatgctaccgaactgtactgcttctacagtgagaacacggatctgacttgtcggcagcccaaatgtgacaagtgcaatgctgcctatcctcacctggctcacctgccatctgccatggcagactcatccttccggtttcctcgcacatggtggcagtctgcggaggatgtgcacagagaaaagatccagttagacctggaagctgaattctacttcactcacctaattgtgatgttcaagtcccccaggccggctgccatggtgctggaccgctcccaggactttgggaaaacatggaagccttataagtactttgcgactaactgctccgctacatttggcctggaagatgatgttgtcaagaagggcgctatttgtactcctaaatactccagtccttttccatgcactggaggagaggttattttcaaagctttgtcaccaccatacgatacagagaacccttacagtgccaaagttcaggagcagctgaagatcaccaaccttcgcgtgcagctgctgaaacgacagtcttatccctgtcagagaaatgacctgaacgaagagcctcaacattttacacactatgcgatctatgatttcattgtcaagggcagctgcttctgcaatggccacgccgatcaatgcatacctgttcatggcttcagacctgtcaaggccccaggaacattccacatggtccatgggaagtgtatgtgtaagcacaacacagcaggcagccactgccagcactgtgccccgttatacaatgaccggccatgggaggcagctgatggcaaaacgggggctcccaacgagtgcagaacctgcaagtgtaatgggcatgctgatacctgtcacttcgacgttaatgtgtgggaggcatcagggaatcgtagtggtggtgtctgtgatgactgtcagcacaacacagaaggacagtattgccagaggtgcaagccaggcttctatcgtgacctgcggagacccttctcagctccagatgcttgcaaaccgtgttcctgccatccagtaggatcagctgtccttcctgccaactcagtgaccttctgcgaccccagcaatggtgactgcccttgcaagcctggggtggcagggcgacgttgtgacaggtgcatggtgggatactggggcttcggagactatggctgtcgaccatgtgactgtgcggggagctgtgaccctatcaccggagactgcatcagcagccacacagacatagactggtatcatgaagttcctgacttccgtcccgtgcacaataagagcgaaccagcctgggagtgggaggatgcgcaggggttttctgcacttctacactcaggtaaatgcgaatgtaaggaacagacattaggaaag

SEQ ID NO: 228 - protein, 515 aa, Homo sapiens
MGSCARLLLLWGCTVVAAGLSGVAGVSSRCEKACNPRMGNLALGRKLWADTTCGQNATELYCFYSENTDLTCRQPKCDKCNAAYPHLAHLPSAMADSSFRFPRTWWQSAEDVHREKIQLDLEAEFYFTHLIVMFKSPRPAAMVLDRSQDFGKTWKPYKYFATNCSATFGLEDDVVKKGAICTPKYSSPFPCTGGEVIFKALSPPYDTENPYSAKVQEQLKITNLRVQLLKRQSYPCQRNDLNEEPQHFTHYAIYDFIVKGSCFCNGHADQCIPVHGFRPVKAPGTFHMVHGKCMCKHNTAGSHCQHCAPLYNDRPWEAADGKTGAPNECRTCKCNGHADTCHFDVNVWEASGNRSGGVCDDCQHNTEGQYCQRCKPGFYRDLRRPFSAPDACKPCSCHPVGSAVLPANSVTFCDPSNGDCPCKPGVAGRRCDRCMVGYWGFGDYGCRPCDCAGSCDPITGDCISSHTDIDWYHEVPDFRPVHNKSEPAWEWEDAQGFSALLHSGKCECKEQTLGK

SEQ ID NO: 229 - DNA, 1545 bp, Homo sapiens
  CDS (1)..(1545)
atggggagctgcgcgcggctgctgctgctctggggctgcacggtggtggccgcaggactgagtggagtagctggagtgagttcccgctgtgaaaaagcctgcaaccctcggatgggaaatttggctttggggcgaaaactctgggcagacaccacctgcggtcagaatgctaccgaactgtactgcttctacagtgagaacacggatctgacttgtcggcagcccaaatgtgacaagtgcaatgctgcctatcctcacctggctcacctgccatctgccatggcagactcatccttccggtttcctcgcacatggtggcagtctgcggaggatgtgcacagagaaaagatccagttagacctggaagctgaattctacttcactcacctaattgtgatgttcaagtcccccaggccggctgccatggtgctggaccgctcccaggactttgggaaaacatggaagccttataagtactttgcgactaactgctccgctacatttggcctggaagatgatgttgtcaagaagggcgctatttgtactcctaaatactccagtccttttccatgcactggaggagaggttattttcaaagctttgtcaccaccatacgatacagagaacccttacagtgccaaagttcaggagcagctgaagatcaccaaccttcgcgtgcagctgctgaaacgacagtcttatccctgtcagagaaatgacctgaacgaagagcctcaacattttacacactatgcgatctatgatttcattgtcaagggcagctgcttctgcaatggccacgccgatcaatgcatacctgttcatggcttcagacctgtcaaggccccaggaacattccacatggtccatgggaagtgtatgtgtaagcacaacacagcaggcagccactgccagcactgtgccccgttatacaatgaccggccatgggaggcagctgatggcaaaacgggggctcccaacgagtgcagaacctgcaagtgtaatgggcatgctgatacctgtcacttcgacgttaatgtgtgggaggcatcagggagtcgtagtggtggtgtctgtgatgactgtcagcacaacacagaaggacagtattgccagaggtgcaagccaggcttctatcgtgacctgcggagacccttctcagctccagatgcttgcaaaccgtgttcctgccatccagtaggatcagctgtccttcctgccaactcagtgaccttctgcgaccccagcaatggtgactgcccttgcaagcctggggtggcagggcgacgttgtgacaggtgcatggtgggatactggggcttcggagactatggctgtcgaccatgtgactgtgcggggagctgtgaccctatcaccggagactgcatcagcagccacacagacatagactggtgtcatgaagttcctgacttccgtcccgtgcacaataagagcgaaccagcctgggagtgggaggatgcgcaggggttttctgcacttctacactcaggtaaatgcgaatgtaaggaacagacattaggaaag

SEQ ID NO: 230 - protein, 515 aa, Homo sapiens
MGSCARLLLLWGCTVVAAGLSGVAGVSSRCEKACNPRMGNLALGRKLWADTTCGQNATELYCFYSENTDLTCRQPKCDKCNAAYPHLAHLPSAMADSSFRFPRTWWQSAEDVHREKIQLDLEAEFYFTHLIVMFKSPRPAAMVLDRSQDFGKTWKPYKYFATNCSATFGLEDDVVKKGAICTPKYSSPFPCTGGEVIFKALSPPYDTENPYSAKVQEQLKITNLRVQLLKRQSYPCQRNDLNEEPQHFTHYAIYDFIVKGSCFCNGHADQCIPVHGFRPVKAPGTFHMVHGKCMCKHNTAGSHCQHCAPLYNDRPWEAADGKTGAPNECRTCKCNGHADTCHFDVNVWEASGSRSGGVCDDCQHNTEGQYCQRCKPGFYRDLRRPFSAPDACKPCSCHPVGSAVLPANSVTFCDPSNGDCPCKPGVAGRRCDRCMVGYWGFGDYGCRPCDCAGSCDPITGDCISSHTDIDWCHEVPDFRPVHNKSEPAWEWEDAQGFSALLHSGKCECKEQTLGK

SEQ ID NO: 231 - DNA, 1545 bp, Homo sapiens
  CDS (1)..(1545)
atggggagctgcgcgcggctgctgctgctctggggctgcacggtggtggccgcaggactgagtggagtagctggagtgagttcccgctgtgaaaaagcctgcaaccctcggatgggaaatttggctttggggcgaaaactctgggcagacaccacctgcggtcagaatgctaccgaactgtactgcttctacagtgagaacacggatctgacttgtcggcagcccaaatgtgacaagtgcaatgctgcctatcctcacctggctcacctgccatctgccatggcagactcatccttccggtttcctcgcacatggtggcagtctgcggaggatgtgcacagagaaaagatccagttagacctggaagctgaattctacttcactcacctaattgtgatgttcaagtcccccaggccggctgccatggtgctggaccgctcccaggactttgggaaaacatggaagccttataagtactttgcgactaactgctccgctacatttggcctggaagatgatgttgtcaagaagggcgctatttgtactcctaaatactccagtccttttccatgcactggaggagaggttattttcaaagctttgtcaccaccatacgatacagagaacccttacagtgccaaagttcaggagcagctgaagatcaccaaccttcgcgtgcagctgctgaaacgacagtcttatccctgtcagagaaatgacctgaacgaagagcctcaacattttacacactatgcgatctatgatttcattgtcaagggcagctgcttctgcaatggccacgccgatcaatgcatacctgttcatggcttcagacctgtcaaggccccaggaacattccacatggtccatgggaagtgtatgtgtaagcacaacacagcaggcagccactgccagcactgtgccccgttatacaatgaccggccatgggaggcagctgatggcaaaacgggggctcccaacgagtgcagaacccgcaagtgtaatgggcatgctgatacctgtcacttcgacgttaatgtgtgggaggcatcagggaatcgtagtggtggtgtctgtgatgactgtcagcacaacacagaaggacagtattgccagaggtgcaagccaggcttctatcgtgacctgcggagacccttctcagctccagatgcttgcaaaccgtgttcctgccatccagtaggatcagctgtccttcctgccaactcagtgaccttctgcgaccccagcaatggtgactgcccttgcaagcctggggtggcagggcgacgttgtgacaggtgcatggtgggatactggggcttcggagactatggctgtcgaccatgtgactgtgcggggagctgtgaccctatcaccggagactgcatcagcagccacacagacatagactggtgtcatgaagttcctgacttccgtcccgtgcacaataagagcgaaccagcctgggagtgggaggatgcgcaggggttttctgcacttctacactcaggtaaatgcgaatgtaaggaacagacattaggaaag

SEQ ID NO: 232 - protein, 515 aa, Homo sapiens
MGSCARLLLLWGCTVVAAGLSGVAGVSSRCEKACNPRMGNLALGRKLWADTTCGQNATELYCFYSENTDLTCRQPKCDKCNAAYPHLAHLPSAMADSSFRFPRTWWQSAEDVHREKIQLDLEAEFYFTHLIVMFKSPRPAAMVLDRSQDFGKTWKPYKYFATNCSATFGLEDDVVKKGAICTPKYSSPFPCTGGEVIFKALSPPYDTENPYSAKVQEQLKITNLRVQLLKRQSYPCQRNDLNEEPQHFTHYAIYDFIVKGSCFCNGHADQCIPVHGFRPVKAPGTFHMVHGKCMCKHNTAGSHCQHCAPLYNDRPWEAADGKTGAPNECRTRKCNGHADTCHFDVNVWEASGNRSGGVCDDCQHNTEGQYCQRCKPGFYRDLRRPFSAPDACKPCSCHPVGSAVLPANSVTFCDPSNGDCPCKPGVAGRRCDRCMVGYWGFGDYGCRPCDCAGSCDPITGDCISSHTDIDWCHEVPDFRPVHNKSEPAWEWEDAQGFSALLHSGKCECKEQTLGK

SEQ ID NO: 233 - DNA, 1545 bp, Homo sapiens
  CDS (1)..(1545)
atggggagctgcgcgcggctgctgctgctctggggctgcacggtggtggccgcaggactgagtggagtagctggagtgagttcccgctgtgaaaaagcctgcaaccctcggatgggaaatttggctttggggcgaaaactctgggcagacaccacctgcggtcagaatgctaccgaactgtactgcttctacagtgagaacacggatctgacttgtcggcagcccaaatgtgacaagtgcaatgctgcctatcctcacctggctcacctgccatctgccatggcagactcatccttccggtttcctcgcacatggtggcagtctgcggaggatgtgcacagagaaaagatccagttagacctggaagctgaattctacttcactcacctaattgtgatgttcaagtcccccaggccggctgccatggtgctggaccgctcccaggactttgggaaaacatggaagccttataagtactttgcgactaactgctccgctacatttggcctggaagatgatgttgtcaagaagggcgctatttgtactcctaaatactccagtccttttccatgcactggaggagaggttattttcaaagctttgtcaccaccatacgatacagagaacccttacagtgccaaagttcaggagcagctgaagatcaccaaccttcgcgtgcagctgctgaaacgacagtcttatccctgtcagagaaatgacctgaacgaagagcctcaacattttacacactatgcgatctatgatttcattgtcaagggcagctgcttctgcaatggccacgccgatcaatgcatacctgttcatggcttcagacctgtcaaggccccaggaacattccacatggtccatgggaagtgtatgtgtaagcacaacacagcaggcagccactgccagcactgtgccccgttatacaatgaccggccatgggaggcagctgatggcaaaacgggggctcccaacgagtgcagagcctgcaagtgtaatgggcatgctgatacctgtcacttcgacgttaatgtgtgggaggcatcagggaatcgtagtggtggtgtctgtgatgactgtcagcacaacacagaaggacagtattgccagaggtgcaagccaggcttctatcgtgacctgcggagacccttctcagctccagatgcttgcaaaccgtgttcctgccatccagtaggatcagctgtccttcctgccaactcagtgaccttctgcgaccccagcaatggtgactgcccttgcaagcctggggtggcagggcgacgttgtgacaggtgcatggtgggatactggggcttcggagactatggctgtcgaccatgtgactgtgcggggagctgtgaccctatcaccggagactgcatcagcagccacacagacatagactggtatcatgaagttcctgacttccgtcccgtgcacaataagagcgaaccagcctgggagtgggaggatgcgcaggggttttctgcacttctacactcaggtaaatgcgaatgtaaggaacagacattaggaaag

SEQ ID NO: 234 - protein, 515 aa, Homo sapiens
MGSCARLLLLWGCTVVAAGLSGVAGVSSRCEKACNPRMGNLALGRKLWADTTCGQNATELYCFYSENTDLTCRQPKCDKCNAAYPHLAHLPSAMADSSFRFPRTWWQSAEDVHREKIQLDLEAEFYFTHLIVMFKSPRPAAMVLDRSQDFGKTWKPYKYFATNCSATFGLEDDVVKKGAICTPKYSSPFPCTGGEVIFKALSPPYDTENPYSAKVQEQLKITNLRVQLLKRQSYPCQRNDLNEEPQHFTHYAIYDFIVKGSCFCNGHADQCIPVHGFRPVKAPGTFHMVHGKCMCKHNTAGSHCQHCAPLYNDRPWEAADGKTGAPNECRACKCNGHADTCHFDVNVWEASGNRSGGVCDDCQHNTEGQYCQRCKPGFYRDLRRPFSAPDACKPCSCHPVGSAVLPANSVTFCDPSNGDCPCKPGVAGRRCDRCMVGYWGFGDYGCRPCDCAGSCDPITGDCISSHTDIDWYHEVPDFRPVHNKSEPAWEWEDAQGFSALLHSGKCECKEQTLGK

SEQ ID NO: 235 - DNA, 1545 bp, Homo sapiens
  CDS (1)..(1545)
atggggagctgcgcgcggctgctgctgctctggggctgcacggtggtggccgcaggactgagtggagtagctggagtgagttcccgctgtgaaaaagcctgcaaccctcggatgggaaatttggctttggggcgaaaactctgggcagacaccacctgcggtcagaatgctaccgaactgtactgcttctacagtgagaacacggatctgacttgtcggcagcccaaatgtgacaagtgcaatgctgcctatcctcacctggctcacctgccatctgccatggcagactcatccttccggtttcctcgcacatggtggcagtctgcggaggatgtgcacagagaaaagatccagttagacctggaagctgaattctacttcactcacctaattgtgatgttcaagtcccccaggccggctgccatggtgctggaccgctcccaggactttgggaaaacatggaagccttataagtactttgcgactaactgctccgctacatttggcctggaagatgatgttgtcaagaagggcgctatttgtactcctaaatactccagtccttttccatgcactggaggagaggttattttcaaagctttgtcaccaccatacgatacagagaacccttacagtgccaaagttcaggagcagctgaagatcaccaaccttcgcgtgcagctgctgaaacgacagtcttatccctgtcagagaaatgacctgaacgaagagcctcaacattttacacactatgcgatctatgatttcattgtcaagggcagctgcttctgcaatggccacgccgatcaatgcatacctgttcatggcttcagacctgtcaaggccccaggaacattccacatggtccatgggaagtgtatgtgtaagcacaacacagcaggcagccactgccagcactgtgccccgttatacaatgaccggccatgggaggcagctgatggcaaaacgggggctcccaacgagtgcagagcctgcaagtgtaatgggcatgctgatacctgtcacttcgacgttaatgtgtgggaggcatcagggagtcgtagtggtggtgtctgtgatgactgtcagcacaacacagaaggacagtattgccagaggtgcaagccaggcttctatcgtgacctgcggagacccttctcagctccagatgcttgcaaaccgtgttcctgccatccagtaggatcagctgtccttcctgccaactcagtgaccttctgcgaccccagcaatggtgactgcccttgcaagcctggggtggcagggcgacgttgtgacaggtgcatggtgggatactggggcttcggagactatggctgtcgaccatgtgactgtgcggggagctgtgaccctatcaccggagactgcatcagcagccacacagacatagactggtgtcatgaagttcctgacttccgtcccgtgcacaataagagcgaaccagcctgggagtgggaggatgcgcaggggttttctgcacttctacactcaggtaaatgcgaatgtaaggaacagacattaggaaag

SEQ ID NO: 236 - protein, 515 aa, Homo sapiens
MGSCARLLLLWGCTVVAAGLSGVAGVSSRCEKACNPRMGNLALGRKLWADTTCGQNATELYCFYSENTDLTCRQPKCDKCNAAYPHLAHLPSAMADSSFRFPRTWWQSAEDVHREKIQLDLEAEFYFTHLIVMFKSPRPAAMVLDRSQDFGKTWKPYKYFATNCSATFGLEDDVVKKGAICTPKYSSPFPCTGGEVIFKALSPPYDTENPYSAKVQEQLKITNLRVQLLKRQSYPCQRNDLNEEPQHFTHYAIYDFIVKGSCFCNGHADQCIPVHGFRPVKAPGTFHMVHGKCMCKHNTAGSHCQHCAPLYNDRPWEAADGKTGAPNECRACKCNGHADTCHFDVNVWEASGSRSGGVCDDCQHNTEGQYCQRCKPGFYRDLRRPFSAPDACKPCSCHPVGSAVLPANSVTFCDPSNGDCPCKPGVAGRRCDRCMVGYWGFGDYGCRPCDCAGSCDPITGDCISSHTDIDWCHEVPDFRPVHNKSEPAWEWEDAQGFSALLHSGKCECKEQTLGK

SEQ ID NO: 237 - DNA, 1545 bp, Homo sapiens
  CDS (1)..(1545)
atggggagctgcgcgcggctgctgctgctctggggctgcacggtggtggccgcaggactgagtggagtagctggagtgagttcccgctgtgaaaaagcctgcaaccctcggatgggaaatttggctttggggcgaaaactctgggcagacaccacctgcggtcagaatgctaccgaactgtactgcttctacagtgagaacacggatctgacttgtcggcagcccaaatgtgacaagtgcaatgctgcctatcctcacctggctcacctgccatctgccatggcagactcatccttccggtttcctcgcacatggtggcagtctgcggaggatgtgcacagagaaaagatccagttagacctggaagctgaattctacttcactcacctaattgtgatgttcaagtcccccaggccggctgccatggtgctggaccgctcccaggactttgggaaaacatggaagccttataagtactttgcgactaactgctccgctacatttggcctggaagatgatgttgtcaagaagggcgctatttgtactcctaaatactccagtccttttccatgcactggaggagaggttattttcaaagctttgtcaccaccatacgatacagagaacccttacagtgccaaagttcaggagcagctgaagatcaccaaccttcgcgtgcagctgctgaaacgacagtcttatccctgtcagagaaatgacctgaacgaagagcctcaacattttacacactatgcgatctatgatttcattgtcaagggcagctgcttctgcaatggccacgccgatcaatgcatacctgttcatggcttcagacctgtcaaggccccaggaacattccacatggtccatgggaagtgtatgtgtaagcacaacacagcaggcagccactgccagcactgtgccccgttatacaatgaccggccatgggaggcagctgatggcaaaacgggggctcccaacgagtgcagagcccgcaagtgtaatgggcatgctgatacctgtcacttcgacgttaatgtgtgggaggcatcagggaatcgtagtggtggtgtctgtgatgactgtcagcacaacacagaaggacagtattgccagaggtgcaagccaggcttctatcgtgacctgcggagacccttctcagctccagatgcttgcaaaccgtgttcctgccatccagtaggatcagctgtccttcctgccaactcagtgaccttctgcgaccccagcaatggtgactgcccttgcaagcctggggtggcagggcgacgttgtgacaggtgcatggtgggatactggggcttcggagactatggctgtcgaccatgtgactgtgcggggagctgtgaccctatcaccggagactgcatcagcagccacacagacatagactggtgtcatgaagttcctgacttccgtcccgtgcacaataagagcgaaccagcctgggagtgggaggatgcgcaggggttttctgcacttctacactcaggtaaatgcgaatgtaaggaacagacattaggaaag

SEQ ID NO: 238 - protein, 515 aa, Homo sapiens
MGSCARLLLLWGCTVVAAGLSGVAGVSSRCEKACNPRMGNLALGRKLWADTTCGQNATELYCFYSENTDLTCRQPKCDKCNAAYPHLAHLPSAMADSSFRFPRTWWQSAEDVHREKIQLDLEAEFYFTHLIVMFKSPRPAAMVLDRSQDFGKTWKPYKYFATNCSATFGLEDDVVKKGAICTPKYSSPFPCTGGEVIFKALSPPYDTENPYSAKVQEQLKITNLRVQLLKRQSYPCQRNDLNEEPQHFTHYAIYDFIVKGSCFCNGHADQCIPVHGFRPVKAPGTFHMVHGKCMCKHNTAGSHCQHCAPLYNDRPWEAADGKTGAPNECRARKCNGHADTCHFDVNVWEASGNRSGGVCDDCQHNTEGQYCQRCKPGFYRDLRRPFSAPDACKPCSCHPVGSAVLPANSVTFCDPSNGDCPCKPGVAGRRCDRCMVGYWGFGDYGCRPCDCAGSCDPITGDCISSHTDIDWCHEVPDFRPVHNKSEPAWEWEDAQGFSALLHSGKCECKEQTLGK

SEQ ID NO: 239 - DNA, 1545 bp, Homo sapiens
  CDS (1)..(1545)
atggggagctgcgcgcggctgctgctgctctggggctgcacggtggtggccgcaggactgagtggagtagctggagtgagttcccgctgtgaaaaagcctgcaaccctcggatgggaaatttggctttggggcgaaaactctgggcagacaccacctgcggtcagaatgctaccgaactgtactgcttctacagtgagaacacggatctgacttgtcggcagcccaaatgtgacaagtgcaatgctgcctatcctcacctggctcacctgccatctgccatggcagactcatccttccggtttcctcgcacatggtggcagtctgcggaggatgtgcacagagaaaagatccagttagacctggaagctgaattctacttcactcacctaattgtgatgttcaagtcccccaggccggctgccatggtgctggaccgctcccaggactttgggaaaacatggaagccttataagtactttgcgactaactgctccgctacatttggcctggaagatgatgttgtcaagaagggcgctatttgtactcctaaatactccagtccttttccatgcactggaggagaggttattttcaaagctttgtcaccaccatacgatacagagaacccttacagtgccaaagttcaggagcagctgaagatcaccaaccttcgcgtgcagctgctgaaacgacagtcttatccctgtcagagaaatgacctgaacgaagagcctcaacattttacacactatgcgatctatgatttcattgtcaagggcagctgcttctgcaatggccacgccgatcaatgcatacctgttcatggcttcagacctgtcaaggccccaggaacattccacatggtccatgggaagtgtatgtgtaagcacaacacagcaggcagccactgccagcactgtgccccgttatacaatgaccggccatgggaggcagctgatggcaaaacgggggctcccaacgagtgcagaacctgcaagtgtaatgggcatgctgatacctgtcacttcgacgttaatgtgtgggaggcatcagggaatcgtagtggtggtgtctgtgatgactgtcagcacaacacagaaggacagtattgccagaggtgcaagccaggcttctatcgtgacctgcggagacccttctcagctccagatgcttgcaaaccgtgttcctgccatccagtaggatcagctgtccttcctgccaactcagtgaccttctgcgaccccagcaatggtgactgcccttgcaagcctggggtggcagggcgacgttgtgacaggtgcatggtgggatactggggcttcggagactatggctgtcgaccatgtgactgtgcggggagctgtgaccctatcaccggagactgcatcagcagccacacagacatagactggtgtcatgaagttcctgacttccgtcccgtgcacaataagagcgaaccagcctgggagtgggaggatgcgcaggggttttctgcacttctacactcaggtaaatgcgaatgtaaggaacagacattaggaaag

SEQ ID NO: 240 - protein, 515 aa, Homo sapiens
MGSCARLLLLWGCTVVAAGLSGVAGVSSRCEKACNPRMGNLALGRKLWADTTCGQNATELYCFYSENTDLTCRQPKCDKCNAAYPHLAHLPSAMADSSFRFPRTWWQSAEDVHREKIQLDLEAEFYFTHLIVMFKSPRPAAMVLDRSQDFGKTWKPYKYFATNCSATFGLEDDVVKKGAICTPKYSSPFPCTGGEVIFKALSPPYDTENPYSAKVQEQLKITNLRVQLLKRQSYPCQRNDLNEEPQHFTHYAIYDFIVKGSCFCNGHADQCIPVHGFRPVKAPGTFHMVHGKCMCKHNTAGSHCQHCAPLYNDRPWEAADGKTGAPNECRTCKCNGHADTCHFDVNVWEASGNRSGGVCDDCQHNTEGQYCQRCKPGFYRDLRRPFSAPDACKPCSCHPVGSAVLPANSVTFCDPSNGDCPCKPGVAGRRCDRCMVGYWGFGDYGCRPCDCAGSCDPITGDCISSHTDIDWCHEVPDFRPVHNKSEPAWEWEDAQGFSALLHSGKCECKEQTLGK

SEQ ID NO: 241 - DNA, 1545 bp, Homo sapiens
  CDS (1)..(1545)
atggggagctgcgcgcggctgctgctgctctggggctgcacggtggtggccgcaggactgagtggagtagctggagtgagttcccgctgtgaaaaagcctgcaaccctcggatgggaaatttggctttggggcgaaaactctgggcagacaccacctgcggtcagaatgctaccgaactgtactgcttctacagtgagaacacggatctgacttgtcggcagcccaaatgtgacaagtgcaatgctgcctatcctcacctggctcacctgccatctgccatggcagactcatccttccggtttcctcgcacatggtggcagtctgcggaggatgtgcacagagaaaagatccagttagacctggaagctgaattctacttcactcacctaattgtgatgttcaagtcccccaggccggctgccatggtgctggaccgctcccaggactttgggaaaacatggaagccttataagtactttgcgactaactgctccgctacatttggcctggaagatgatgttgtcaagaagggcgctatttgtactcctaaatactccagtccttttccatgcactggaggagaggttattttcaaagctttgtcaccaccatacgatacagagaacccttacagtgccaaagttcaggagcagctgaagatcaccaaccttcgcgtgcagctgctgaaacgacagtcttatccctgtcagagaaatgacctgaacgaagagcctcaacattttacacactatgcgatctatgatttcattgtcaagggcagctgcttctgcaatggccacgccgatcaatgcatacctgttcatggcttcagacctgtcaaggccccaggaacattccacatggtccatgggaagtgtatgtgtaagcacaacacagcaggcagccactgccagcactgtgccccgttatacaatgaccggccatgggaggcagctgatggcaaaacgggggctcccaacgagtgcagagcctgcaagtgtaatgggcatgctgatacctgtcacttcgacgttaatgtgtgggaggcatcagggaatcgtagtggtggtgtctgtgatgactgtcagcacaacacagaaggacagtattgccagaggtgcaagccaggcttctatcgtgacctgcggagacccttctcagctccagatgcttgcaaaccgtgttcctgccatccagtaggatcagctgtccttcctgccaactcagtgaccttctgcgaccccagcaatggtgactgcccttgcaagcctggggtggcagggcgacgttgtgacaggtgcatggtgggatactggggcttcggagactatggctgtcgaccatgtgactgtgcggggagctgtgaccctatcaccggagactgcatcagcagccacacagacatagactggtgtcatgaagttcctgacttccgtcccgtgcacaataagagcgaaccagcctgggagtgggaggatgcgcaggggttttctgcacttctacactcaggtaaatgcgaatgtaaggaacagacattaggaaag

SEQ ID NO: 242 - protein, 515 aa, Homo sapiens
MGSCARLLLLWGCTVVAAGLSGVAGVSSRCEKACNPRMGNLALGRKLWADTTCGQNATELYCFYSENTDLTCRQPKCDKCNAAYPHLAHLPSAMADSSFRFPRTWWQSAEDVHREKIQLDLEAEFYFTHLIVMFKSPRPAAMVLDRSQDFGKTWKPYKYFATNCSATFGLEDDVVKKGAICTPKYSSPFPCTGGEVIFKALSPPYDTENPYSAKVQEQLKITNLRVQLLKRQSYPCQRNDLNEEPQHFTHYAIYDFIVKGSCFCNGHADQCIPVHGFRPVKAPGTFHMVHGKCMCKHNTAGSHCQHCAPLYNDRPWEAADGKTGAPNECRACKCNGHADTCHFDVNVWEASGNRSGGVCDDCQHNTEGQYCQRCKPGFYRDLRRPFSAPDACKPCSCHPVGSAVLPANSVTFCDPSNGDCPCKPGVAGRRCDRCMVGYWGFGDYGCRPCDCAGSCDPITGDCISSHTDIDWCHEVPDFRPVHNKSEPAWEWEDAQGFSALLHSGKCECKEQTLGK

SEQ ID NO: 243 - DNA, 1545 bp, Homo sapiens
  CDS (1)..(1545)
atggggagctgcgcgcggctgctgctgctctggggctgcacggtggtggccgcaggactgagtggagtagctggagtgagttcccgctgtgaaaaagcctgcaaccctcggatgggaaatttggctttggggcgaaaactctgggcagacaccacctgcggtcagaatgctaccgaactgtactgcttctacagtgagaacaaggatctgacttgtcggcagcccaaatgtgacaagtgcaatgctgcctatcctcacctggctcacctgccatctgccatggcagactcatccttccggtttcctcgcacatggtggcagtctgcggaggatgtgcacagagaaaagatccagttagacctggaagctgaattctacttcactcacctaattgtgatgttcaagtcccccaggccggctgccatggtgctggaccgctcccaggactttgggaaaacatggaagccttataagtactttgcgactaactgctccgctacatttggcctggaagatgatgttgtcaagaagggcgctatttgtacttctaaatactccagtccttttccatgcactggaggagaggttattttcaaagctttgtcaccaccacacgatacagagaacccttacagtgccaaagttcaggagcagctgaagatcaccaaccttcgcgtgcagctgctgaaacgacagtcttgtccctgtcagagaaatgacctgaacgaagagcctcaacattttacacactatgcgatctatgatttcattgtcaagggcagctgcttctgcaatggccacgccgatcaatgcatacctgttcatggcttcagacctgtcaaggccccaggaacattccacatggtccatgggaagtgtatgtgtaagcacaacacagcaggcagccactgccagcactgtgccccgttatacaatgaccggccatgggaggcagctgatggcaaaacgggggctcccaacgagtgcagaacctgcaagtgtaatgggcatgctgatacctgtcacttcgacgttaatgtgtgggaggcatcagggaatcgtagtggtggtgtctgtgatgactgtcagcacaacacagaaggacagtattgccagaggtgcaagccaggcttctatcgtgacctgcggagacccttctcagctccagatgcttgcaaaccgtgttcctgccatccagtaggatcagctgtccttcctgccaactcagtgaccttctgcgaccccagcaatggtgactgcccttgcaagcctggggtggcagggcgacgttgtgacaggtgcatggtgggatactggggcttcggagactatggctgtcgaccatgtgactgtgcggggagctgtgaccctatcaccggagactgcatcagcagccacacagacatagactggtgtcatgaagttcctgacttccgtcccgtgcacaataagagcgaaccagcctgggagtgggaggatgcgcaggggttttctgcacttctacactcaggtaaatgcgaatgtaaggaacagacattaggaaat

SEQ ID NO: 244 - protein, 515 aa, Homo sapiens
MGSCARLLLLWGCTVVAAGLSGVAGVSSRCEKACNPRMGNLALGRKLWADTTCGQNATELYCFYSENKDLTCRQPKCDKCNAAYPHLAHLPSAMADSSFRFPRTWWQSAEDVHREKIQLDLEAEFYFTHLIVMFKSPRPAAMVLDRSQDFGKTWKPYKYFATNCSATFGLEDDVVKKGAICTSKYSSPFPCTGGEVIFKALSPPHDTENPYSAKVQEQLKITNLRVQLLKRQSCPCQRNDLNEEPQHFTHYAIYDFIVKGSCFCNGHADQCIPVHGFRPVKAPGTFHMVHGKCMCKHNTAGSHCQHCAPLYNDRPWEAADGKTGAPNECRTCKCNGHADTCHFDVNVWEASGNRSGGVCDDCQHNTEGQYCQRCKPGFYRDLRRPFSAPDACKPCSCHPVGSAVLPANSVTFCDPSNGDCPCKPGVAGRRCDRCMVGYWGFGDYGCRPCDCAGSCDPITGDCISSHTDIDWCHEVPDFRPVHNKSEPAWEWEDAQGFSALLHSGKCECKEQTLGN

SEQ ID NO: 245 - DNA, 1545 bp, Homo sapiens
  CDS (1)..(1545)
atggggagctgcgcgcggctgctgctgctctggggctgcacggtggtggccgcaggactgagtggagtagctggagtgagttcccgctgtgaaaaagcctgcaaccctcggatgggaaatttggctttggggcgaaaactctgggcagacaccacctgcggtcagaatgctaccgaactgtactgcttctacagtgagaacaaggatctgacttgtcggcagcccaaatgtgacaagtgcaatgctgcctatcctcacctggctcacctgccatctgccatggcagactcatccttccggtttcctcgcacatggtggcagtctgcggaggatgtgcacagagaaaagatccagttagacctggaagctgaattctacttcactcacctaattgtgatgttcaagtcccccaggccggctgccatggtgctggaccgctcccaggactttgggaaaacatggaagccttataagtactttgcgactaactgctccgctacatttggcctggaagatgatgttgtcaagaagggcgctatttgtacttctaaatactccagtccttttccatgcactggaggagaggttattttcaaagctttgtcaccaccacacgatacagagaacccttacagtgccaaagttcaggagcagctgaagatcaccaaccttcgcgtgcagctgctgaaacgacagtcttgtccctgtcagagaaatgacctgaacgaagagcctcaacattttacacactatgcgatctatgatttcattgtcaagggcagctgcttctgcaatggccacgccgatcaatgcatacctgttcatggcttcagacctgtcaaggccccaggaacattccacatggtccatgggaagtgtatgtgtaagcacaacacagcaggcagccactgccagcactgtgccccgttatacaatgaccggccatgggaggcagctgatggcaaaacgggggctcccaacgagtgcagagcccgcaagtgtaatgggcatgctgatacctgtcacttcgacgttaatgtgtgggaggcatcagggaatcgtagtggtggtgtctgtgatgactgtcagcacaacacagaaggacagtattgccagaggtgcaagccaggcttctatcgtgacctgcggagacccttctcagctccagatgcttgcaaaccgtgttcctgccatccagtaggatcagctgtccttcctgccaactcagtgaccttctgcgaccccagcaatggtgactgcccttgcaagcctggggtggcagggcgacgttgtgacaggtgcatggtgggatactggggcttcggagactatggctgtcgaccatgtgactgtgcggggagctgtgaccctatcaccggagactgcatcagcagccacacagacatagactggtgtcatgaagttcctgacttccgtcccgtgcacaataagagcgaaccagcctgggagtgggaggatgcgcaggggttttctgcacttctacactcaggtaaatgcgaatgtaaggaacagacattaggaaat

SEQ ID NO: 246 - protein, 515 aa, Homo sapiens
MGSCARLLLLWGCTVVAAGLSGVAGVSSRCEKACNPRMGNLALGRKLWADTTCGQNATELYCFYSENKDLTCRQPKCDKCNAAYPHLAHLPSAMADSSFRFPRTWWQSAEDVHREKIQLDLEAEFYFTHLIVMFKSPRPAAMVLDRSQDFGKTWKPYKYFATNCSATFGLEDDVVKKGAICTSKYSSPFPCTGGEVIFKALSPPHDTENPYSAKVQEQLKITNLRVQLLKRQSCPCQRNDLNEEPQHFTHYAIYDFIVKGSCFCNGHADQCIPVHGFRPVKAPGTFHMVHGKCMCKHNTAGSHCQHCAPLYNDRPWEAADGKTGAPNECRARKCNGHADTCHFDVNVWEASGNRSGGVCDDCQHNTEGQYCQRCKPGFYRDLRRPFSAPDACKPCSCHPVGSAVLPANSVTFCDPSNGDCPCKPGVAGRRCDRCMVGYWGFGDYGCRPCDCAGSCDPITGDCISSHTDIDWCHEVPDFRPVHNKSEPAWEWEDAQGFSALLHSGKCECKEQTLGN

SEQ ID NO: 247 - DNA, 1545 bp, Homo sapiens
  CDS (1)..(1545)
atggggagctgcgcgcggctgctgctgctctggggctgcacggtggtggccgcaggactgagtggagtagctggagtgagttcccgctgtgaaaaagcctgcaaccctcggatgggaaatttggctttggggcgaaaactctgggcagacaccacctgcggtcagaatgctaccgaactgtactgcttctacagtgagaacaaggatctgacttgtcggcagcccaaatgtgacaagtgcaatgctgcctatcctcacctggctcacctgccatctgccatggcagactcatccttccggtttcctcgcacatggtggcagtctgcggaggatgtgcacagagaaaagatccagttagacctggaagctgaattctacttcactcacctaattgtgatgttcaagtcccccaggccggctgccatggtgctggaccgctcccaggactttgggaaaacatggaagccttataagtactttgcgactaactgctccgctacatttggcctggaagatgatgttgtcaagaagggcgctatttgtacttctaaatactccagtccttttccatgcactggaggagaggttattttcaaagctttgtcaccaccacacgatacagagaacccttacagtgccaaagttcaggagcagctgaagatcaccaaccttcgcgtgcagctgctgaaacgacagtcttgtccctgtcagagaaatgacctgaacgaagagcctcaacattttacacactatgcgatctatgatttcattgtcaagggcagctgcttctgcaatggccacgccgatcaatgcatacctgttcatggcttcagacctgtcaaggccccaggaacattccacatggtccatgggaagtgtatgtgtaagcacaacacagcaggcagccactgccagcactgtgccccgttatacaatgaccggccatgggaggcagctgatggcaaaacgggggctcccaacgagtgcagagcctgcaagtgtaatgggcatgctgatacctgtcacttcgacgttaatgtgtgggaggcatcagggagtcgtagtggtggtgtctgtgatgactgtcagcacaacacagaaggacagtattgccagaggtgcaagccaggcttctatcgtgacctgcggagacccttctcagctccagatgcttgcaaaccgtgttcctgccatccagtaggatcagctgtccttcctgccaactcagtgaccttctgcgaccccagcaatggtgactgcccttgcaagcctggggtggcagggcgacgttgtgacaggtgcatggtgggatactggggcttcggagactatggctgtcgaccatgtgactgtgcggggagctgtgaccctatcaccggagactgcatcagcagccacacagacatagactggtgtcatgaagttcctgacttccgtcccgtgcacaataagagcgaaccagcctgggagtgggaggatgcgcaggggttttctgcacttctacactcaggtaaatgcgaatgtaaggaacagacattaggaaat

SEQ ID NO: 248 - protein, 515 aa, Homo sapiens
MGSCARLLLLWGCTVVAAGLSGVAGVSSRCEKACNPRMGNLALGRKLWADTTCGQNATELYCFYSENKDLTCRQPKCDKCNAAYPHLAHLPSAMADSSFRFPRTWWQSAEDVHREKIQLDLEAEFYFTHLIVMFKSPRPAAMVLDRSQDFGKTWKPYKYFATNCSATFGLEDDVVKKGAICTSKYSSPFPCTGGEVIFKALSPPHDTENPYSAKVQEQLKITNLRVQLLKRQSCPCQRNDLNEEPQHFTHYAIYDFIVKGSCFCNGHADQCIPVHGFRPVKAPGTFHMVHGKCMCKHNTAGSHCQHCAPLYNDRPWEAADGKTGAPNECRACKCNGHADTCHFDVNVWEASGSRSGGVCDDCQHNTEGQYCQRCKPGFYRDLRRPFSAPDACKPCSCHPVGSAVLPANSVTFCDPSNGDCPCKPGVAGRRCDRCMVGYWGFGDYGCRPCDCAGSCDPITGDCISSHTDIDWCHEVPDFRPVHNKSEPAWEWEDAQGFSALLHSGKCECKEQTLGN

SEQ ID NO: 249 - DNA, 1545 bp, Homo sapiens
  CDS (1)..(1545)
atggggagctgcgcgcggctgctgctgctctggggctgcacggtggtggccgcaggactgagtggagtagctggagtgagttcccgctgtgaaaaagcctgcaaccctcggatgggaaatttggctttggggcgaaaactctgggcagacaccacctgcggtcagaatgctaccgaactgtactgcttctacagtgagaacaaggatctgacttgtcggcagcccaaatgtgacaagtgcaatgctgcctatcctcacctggctcacctgccatctgccatggcagactcatccttccggtttcctcgcacatggtggcagtctgcggaggatgtgcacagagaaaagatccagttagacctggaagctgaattctacttcactcacctaattgtgatgttcaagtcccccaggccggctgccatggtgctggaccgctcccaggactttgggaaaacatggaagccttataagtactttgcgactaactgctccgctacatttggcctggaagatgatgttgtcaagaagggcgctatttgtacttctaaatactccagtccttttccatgcactggaggagaggttattttcaaagctttgtcaccaccacacgatacagagaacccttacagtgccaaagttcaggagcagctgaagatcaccaaccttcgcgtgcagctgctgaaacgacagtcttgtccctgtcagagaaatgacctgaacgaagagcctcaacattttacacactatgcgatctatgatttcattgtcaagggcagctgcttctgcaatggccacgccgatcaatgcatacctgttcatggcttcagacctgtcaaggccccaggaacattccacatggtccatgggaagtgtatgtgtaagcacaacacagcaggcagccactgccagcactgtgccccgttatacaatgaccggccatgggaggcagctgatggcaaaacgggggctcccaacgagtgcagagcctgcaagtgtaatgggcatgctgatacctgtcacttcgacgttaatgtgtgggaggcatcagggaatcgtagtggtggtgtctgtgatgactgtcagcacaacacagaaggacagtattgccagaggtgcaagccaggcttctatcgtgacctgcggagacccttctcagctccagatgcttgcaaaccgtgttcctgccatccagtaggatcagctgtccttcctgccaactcagtgaccttctgcgaccccagcaatggtgactgcccttgcaagcctggggtggcagggcgacgttgtgacaggtgcatggtgggatactggggcttcggagactatggctgtcgaccatgtgactgtgcggggagctgtgaccctatcaccggagactgcatcagcagccacacagacatagactggtatcatgaagttcctgacttccgtcccgtgcacaataagagcgaaccagcctgggagtgggaggatgcgcaggggttttctgcacttctacactcaggtaaatgcgaatgtaaggaacagacattaggaaat

SEQ ID NO: 250 - protein, 515 aa, Homo sapiens
MGSCARLLLLWGCTVVAAGLSGVAGVSSRCEKACNPRMGNLALGRKLWADTTCGQNATELYCFYSENKDLTCRQPKCDKCNAAYPHLAHLPSAMADSSFRFPRTWWQSAEDVHREKIQLDLEAEFYFTHLIVMFKSPRPAAMVLDRSQDFGKTWKPYKYFATNCSATFGLEDDVVKKGAICTSKYSSPFPCTGGEVIFKALSPPHDTENPYSAKVQEQLKITNLRVQLLKRQSCPCQRNDLNEEPQHFTHYAIYDFIVKGSCFCNGHADQCIPVHGFRPVKAPGTFHMVHGKCMCKHNTAGSHCQHCAPLYNDRPWEAADGKTGAPNECRACKCNGHADTCHFDVNVWEASGNRSGGVCDDCQHNTEGQYCQRCKPGFYRDLRRPFSAPDACKPCSCHPVGSAVLPANSVTFCDPSNGDCPCKPGVAGRRCDRCMVGYWGFGDYGCRPCDCAGSCDPITGDCISSHTDIDWYHEVPDFRPVHNKSEPAWEWEDAQGFSALLHSGKCECKEQTLGN

SEQ ID NO: 251 - DNA, 1545 bp, Homo sapiens
  CDS (1)..(1545)
atggggagctgcgcgcggctgctgctgctctggggctgcacggtggtggccgcaggactgagtggagtagctggagtgagttcccgctgtgaaaaagcctgcaaccctcggatgggaaatttggctttggggcgaaaactctgggcagacaccacctgcggtcagaatgctaccgaactgtactgcttctacagtgagaacaaggatctgacttgtcggcagcccaaatgtgacaagtgcaatgctgcctatcctcacctggctcacctgccatctgccatggcagactcatccttccggtttcctcgcacatggtggcagtctgcggaggatgtgcacagagaaaagatccagttagacctggaagctgaattctacttcactcacctaattgtgatgttcaagtcccccaggccggctgccatggtgctggaccgctcccaggactttgggaaaacatggaagccttataagtactttgcgactaactgctccgctacatttggcctggaagatgatgttgtcaagaagggcgctatttgtacttctaaatactccagtccttttccatgcactggaggagaggttattttcaaagctttgtcaccaccacacgatacagagaacccttacagtgccaaagttcaggagcagctgaagatcaccaaccttcgcgtgcagctgctgaaacgacagtcttgtccctgtcagagaaatgacctgaacgaagagcctcaacattttacacactatgcgatctatgatttcattgtcaagggcagctgcttctgcaatggccacgccgatcaatgcatacctgttcatggcttcagacctgtcaaggccccaggaacattccacatggtccatgggaagtgtatgtgtaagcacaacacagcaggcagccactgccagcactgtgccccgttatacaatgaccggccatgggaggcagctgatggcaaaacgggggctcccaacgagtgcagaacccgcaagtgtaatgggcatgctgatacctgtcacttcgacgttaatgtgtgggaggcatcagggaatcgtagtggtggtgtctgtgatgactgtcagcacaacacagaaggacagtattgccagaggtgcaagccaggcttctatcgtgacctgcggagacccttctcagctccagatgcttgcaaaccgtgttcctgccatccagtaggatcagctgtccttcctgccaactcagtgaccttctgcgaccccagcaatggtgactgcccttgcaagcctggggtggcagggcgacgttgtgacaggtgcatggtgggatactggggcttcggagactatggctgtcgaccatgtgactgtgcggggagctgtgaccctatcaccggagactgcatcagcagccacacagacatagactggtgtcatgaagttcctgacttccgtcccgtgcacaataagagcgaaccagcctgggagtgggaggatgcgcaggggttttctgcacttctacactcaggtaaatgcgaatgtaaggaacagacattaggaaat

SEQ ID NO: 252 - protein, 515 aa, Homo sapiens
MGSCARLLLLWGCTVVAAGLSGVAGVSSRCEKACNPRMGNLALGRKLWADTTCGQNATELYCFYSENKDLTCRQPKCDKCNAAYPHLAHLPSAMADSSFRFPRTWWQSAEDVHREKIQLDLEAEFYFTHLIVMFKSPRPAAMVLDRSQDFGKTWKPYKYFATNCSATFGLEDDVVKKGAICTSKYSSPFPCTGGEVIFKALSPPHDTENPYSAKVQEQLKITNLRVQLLKRQSCPCQRNDLNEEPQHFTHYAIYDFIVKGSCFCNGHADQCIPVHGFRPVKAPGTFHMVHGKCMCKHNTAGSHCQHCAPLYNDRPWEAADGKTGAPNECRTRKCNGHADTCHFDVNVWEASGNRSGGVCDDCQHNTEGQYCQRCKPGFYRDLRRPFSAPDACKPCSCHPVGSAVLPANSVTFCDPSNGDCPCKPGVAGRRCDRCMVGYWGFGDYGCRPCDCAGSCDPITGDCISSHTDIDWCHEVPDFRPVHNKSEPAWEWEDAQGFSALLHSGKCECKEQTLGN

SEQ ID NO: 253 - DNA, 1545 bp, Homo sapiens
  CDS (1)..(1545)
atggggagctgcgcgcggctgctgctgctctggggctgcacggtggtggccgcaggactgagtggagtagctggagtgagttcccgctgtgaaaaagcctgcaaccctcggatgggaaatttggctttggggcgaaaactctgggcagacaccacctgcggtcagaatgctaccgaactgtactgcttctacagtgagaacaaggatctgacttgtcggcagcccaaatgtgacaagtgcaatgctgcctatcctcacctggctcacctgccatctgccatggcagactcatccttccggtttcctcgcacatggtggcagtctgcggaggatgtgcacagagaaaagatccagttagacctggaagctgaattctacttcactcacctaattgtgatgttcaagtcccccaggccggctgccatggtgctggaccgctcccaggactttgggaaaacatggaagccttataagtactttgcgactaactgctccgctacatttggcctggaagatgatgttgtcaagaagggcgctatttgtacttctaaatactccagtccttttccatgcactggaggagaggttattttcaaagctttgtcaccaccacacgatacagagaacccttacagtgccaaagttcaggagcagctgaagatcaccaaccttcgcgtgcagctgctgaaacgacagtcttgtccctgtcagagaaatgacctgaacgaagagcctcaacattttacacactatgcgatctatgatttcattgtcaagggcagctgcttctgcaatggccacgccgatcaatgcatacctgttcatggcttcagacctgtcaaggccccaggaacattccacatggtccatgggaagtgtatgtgtaagcacaacacagcaggcagccactgccagcactgtgccccgttatacaatgaccggccatgggaggcagctgatggcaaaacgggggctcccaacgagtgcagaacctgcaagtgtaatgggcatgctgatacctgtcacttcgacgttaatgtgtgggaggcatcagggagtcgtagtggtggtgtctgtgatgactgtcagcacaacacagaaggacagtattgccagaggtgcaagccaggcttctatcgtgacctgcggagacccttctcagctccagatgcttgcaaaccgtgttcctgccatccagtaggatcagctgtccttcctgccaactcagtgaccttctgcgaccccagcaatggtgactgcccttgcaagcctggggtggcagggcgacgttgtgacaggtgcatggtgggatactggggcttcggagactatggctgtcgaccatgtgactgtgcggggagctgtgaccctatcaccggagactgcatcagcagccacacagacatagactggtgtcatgaagttcctgacttccgtcccgtgcacaataagagcgaaccagcctgggagtgggaggatgcgcaggggttttctgcacttctacactcaggtaaatgcgaatgtaaggaacagacattaggaaat

SEQ ID NO: 254 - protein, 515 aa, Homo sapiens
MGSCARLLLLWGCTVVAAGLSGVAGVSSRCEKACNPRMGNLALGRKLWADTTCGQNATELYCFYSENKDLTCRQPKCDKCNAAYPHLAHLPSAMADSSFRFPRTWWQSAEDVHREKIQLDLEAEFYFTHLIVMFKSPRPAAMVLDRSQDFGKTWKPYKYFATNCSATFGLEDDVVKKGAICTSKYSSPFPCTGGEVIFKALSPPHDTENPYSAKVQEQLKITNLRVQLLKRQSCPCQRNDLNEEPQHFTHYAIYDFIVKGSCFCNGHADQCIPVHGFRPVKAPGTFHMVHGKCMCKHNTAGSHCQHCAPLYNDRPWEAADGKTGAPNECRTCKCNGHADTCHFDVNVWEASGSRSGGVCDDCQHNTEGQYCQRCKPGFYRDLRRPFSAPDACKPCSCHPVGSAVLPANSVTFCDPSNGDCPCKPGVAGRRCDRCMVGYWGFGDYGCRPCDCAGSCDPITGDCISSHTDIDWCHEVPDFRPVHNKSEPAWEWEDAQGFSALLHSGKCECKEQTLGN

SEQ ID NO: 255 - DNA, 1545 bp, Homo sapiens
  CDS (1)..(1545)
atggggagctgcgcgcggctgctgctgctctggggctgcacggtggtggccgcaggactgagtggagtagctggagtgagttcccgctgtgaaaaagcctgcaaccctcggatgggaaatttggctttggggcgaaaactctgggcagacaccacctgcggtcagaatgctaccgaactgtactgcttctacagtgagaacaaggatctgacttgtcggcagcccaaatgtgacaagtgcaatgctgcctatcctcacctggctcacctgccatctgccatggcagactcatccttccggtttcctcgcacatggtggcagtctgcggaggatgtgcacagagaaaagatccagttagacctggaagctgaattctacttcactcacctaattgtgatgttcaagtcccccaggccggctgccatggtgctggaccgctcccaggactttgggaaaacatggaagccttataagtactttgcgactaactgctccgctacatttggcctggaagatgatgttgtcaagaagggcgctatttgtacttctaaatactccagtccttttccatgcactggaggagaggttattttcaaagctttgtcaccaccacacgatacagagaacccttacagtgccaaagttcaggagcagctgaagatcaccaaccttcgcgtgcagctgctgaaacgacagtcttgtccctgtcagagaaatgacctgaacgaagagcctcaacattttacacactatgcgatctatgatttcattgtcaagggcagctgcttctgcaatggccacgccgatcaatgcatacctgttcatggcttcagacctgtcaaggccccaggaacattccacatggtccatgggaagtgtatgtgtaagcacaacacagcaggcagccactgccagcactgtgccccgttatacaatgaccggccatgggaggcagctgatggcaaaacgggggctcccaacgagtgcagaacctgcaagtgtaatgggcatgctgatacctgtcacttcgacgttaatgtgtgggaggcatcagggaatcgtagtggtggtgtctgtgatgactgtcagcacaacacagaaggacagtattgccagaggtgcaagccaggcttctatcgtgacctgcggagacccttctcagctccagatgcttgcaaaccgtgttcctgccatccagtaggatcagctgtccttcctgccaactcagtgaccttctgcgaccccagcaatggtgactgcccttgcaagcctggggtggcagggcgacgttgtgacaggtgcatggtgggatactggggcttcggagactatggctgtcgaccatgtgactgtgcggggagctgtgaccctatcaccggagactgcatcagcagccacacagacatagactggtatcatgaagttcctgacttccgtcccgtgcacaataagagcgaaccagcctgggagtgggaggatgcgcaggggttttctgcacttctacactcaggtaaatgcgaatgtaaggaacagacattaggaaat

SEQ ID NO: 256 - protein, 515 aa, Homo sapiens
MGSCARLLLLWGCTVVAAGLSGVAGVSSRCEKACNPRMGNLALGRKLWADTTCGQNATELYCFYSENKDLTCRQPKCDKCNAAYPHLAHLPSAMADSSFRFPRTWWQSAEDVHREKIQLDLEAEFYFTHLIVMFKSPRPAAMVLDRSQDFGKTWKPYKYFATNCSATFGLEDDVVKKGAICTSKYSSPFPCTGGEVIFKALSPPHDTENPYSAKVQEQLKITNLRVQLLKRQSCPCQRNDLNEEPQHFTHYAIYDFIVKGSCFCNGHADQCIPVHGFRPVKAPGTFHMVHGKCMCKHNTAGSHCQHCAPLYNDRPWEAADGKTGAPNECRTCKCNGHADTCHFDVNVWEASGNRSGGVCDDCQHNTEGQYCQRCKPGFYRDLRRPFSAPDACKPCSCHPVGSAVLPANSVTFCDPSNGDCPCKPGVAGRRCDRCMVGYWGFGDYGCRPCDCAGSCDPITGDCISSHTDIDWYHEVPDFRPVHNKSEPAWEWEDAQGFSALLHSGKCECKEQTLGN

SEQ ID NO: 257 - DNA, 1545 bp, Homo sapiens
  CDS (1)..(1545)
atggggagctgcgcgcggctgctgctgctctggggctgcacggtggtggccgcaggactgagtggagtagctggagtgagttcccgctgtgaaaaagcctgcaaccctcggatgggaaatttggctttggggcgaaaactctgggcagacaccacctgcggtcagaatgctaccgaactgtactgcttctacagtgagaacaaggatctgacttgtcggcagcccaaatgtgacaagtgcaatgctgcctatcctcacctggctcacctgccatctgccatggcagactcatccttccggtttcctcgcacatggtggcagtctgcggaggatgtgcacagagaaaagatccagttagacctggaagctgaattctacttcactcacctaattgtgatgttcaagtcccccaggccggctgccatggtgctggaccgctcccaggactttgggaaaacatggaagccttataagtactttgcgactaactgctccgctacatttggcctggaagatgatgttgtcaagaagggcgctatttgtacttctaaatactccagtccttttccatgcactggaggagaggttattttcaaagctttgtcaccaccacacgatacagagaacccttacagtgccaaagttcaggagcagctgaagatcaccaaccttcgcgtgcagctgctgaaacgacagtcttgtccctgtcagagaaatgacctgaacgaagagcctcaacattttacacactatgcgatctatgatttcattgtcaagggcagctgcttctgcaatggccacgccgatcaatgcatacctgttcatggcttcagacctgtcaaggccccaggaacattccacatggtccatgggaagtgtatgtgtaagcacaacacagcaggcagccactgccagcactgtgccccgttatacaatgaccggccatgggaggcagctgatggcaaaacgggggctcccaacgagtgcagaacccgcaagtgtaatgggcatgctgatacctgtcacttcgacgttaatgtgtgggaggcatcagggagtcgtagtggtggtgtctgtgatgactgtcagcacaacacagaaggacagtattgccagaggtgcaagccaggcttctatcgtgacctgcggagacccttctcagctccagatgcttgcaaaccgtgttcctgccatccagtaggatcagctgtccttcctgccaactcagtgaccttctgcgaccccagcaatggtgactgcccttgcaagcctggggtggcagggcgacgttgtgacaggtgcatggtgggatactggggcttcggagactatggctgtcgaccatgtgactgtgcggggagctgtgaccctatcaccggagactgcatcagcagccacacagacatagactggtgtcatgaagttcctgacttccgtcccgtgcacaataagagcgaaccagcctgggagtgggaggatgcgcaggggttttctgcacttctacactcaggtaaatgcgaatgtaaggaacagacattaggaaat

SEQ ID NO: 258 - protein, 515 aa, Homo sapiens
MGSCARLLLLWGCTVVAAGLSGVAGVSSRCEKACNPRMGNLALGRKLWADTTCGQNATELYCFYSENKDLTCRQPKCDKCNAAYPHLAHLPSAMADSSFRFPRTWWQSAEDVHREKIQLDLEAEFYFTHLIVMFKSPRPAAMVLDRSQDFGKTWKPYKYFATNCSATFGLEDDVVKKGAICTSKYSSPFPCTGGEVIFKALSPPHDTENPYSAKVQEQLKITNLRVQLLKRQSCPCQRNDLNEEPQHFTHYAIYDFIVKGSCFCNGHADQCIPVHGFRPVKAPGTFHMVHGKCMCKHNTAGSHCQHCAPLYNDRPWEAADGKTGAPNECRTRKCNGHADTCHFDVNVWEASGSRSGGVCDDCQHNTEGQYCQRCKPGFYRDLRRPFSAPDACKPCSCHPVGSAVLPANSVTFCDPSNGDCPCKPGVAGRRCDRCMVGYWGFGDYGCRPCDCAGSCDPITGDCISSHTDIDWCHEVPDFRPVHNKSEPAWEWEDAQGFSALLHSGKCECKEQTLGN

SEQ ID NO: 259 - DNA, 1545 bp, Homo sapiens
  CDS (1)..(1545)
atggggagctgcgcgcggctgctgctgctctggggctgcacggtggtggccgcaggactgagtggagtagctggagtgagttcccgctgtgaaaaagcctgcaaccctcggatgggaaatttggctttggggcgaaaactctgggcagacaccacctgcggtcagaatgctaccgaactgtactgcttctacagtgagaacaaggatctgacttgtcggcagcccaaatgtgacaagtgcaatgctgcctatcctcacctggctcacctgccatctgccatggcagactcatccttccggtttcctcgcacatggtggcagtctgcggaggatgtgcacagagaaaagatccagttagacctggaagctgaattctacttcactcacctaattgtgatgttcaagtcccccaggccggctgccatggtgctggaccgctcccaggactttgggaaaacatggaagccttataagtactttgcgactaactgctccgctacatttggcctggaagatgatgttgtcaagaagggcgctatttgtacttctaaatactccagtccttttccatgcactggaggagaggttattttcaaagctttgtcaccaccacacgatacagagaacccttacagtgccaaagttcaggagcagctgaagatcaccaaccttcgcgtgcagctgctgaaacgacagtcttgtccctgtcagagaaatgacctgaacgaagagcctcaacattttacacactatgcgatctatgatttcattgtcaagggcagctgcttctgcaatggccacgccgatcaatgcatacctgttcatggcttcagacctgtcaaggccccaggaacattccacatggtccatgggaagtgtatgtgtaagcacaacacagcaggcagccactgccagcactgtgccccgttatacaatgaccggccatgggaggcagctgatggcaaaacgggggctcccaacgagtgcagaacccgcaagtgtaatgggcatgctgatacctgtcacttcgacgttaatgtgtgggaggcatcagggaatcgtagtggtggtgtctgtgatgactgtcagcacaacacagaaggacagtattgccagaggtgcaagccaggcttctatcgtgacctgcggagacccttctcagctccagatgcttgcaaaccgtgttcctgccatccagtaggatcagctgtccttcctgccaactcagtgaccttctgcgaccccagcaatggtgactgcccttgcaagcctggggtggcagggcgacgttgtgacaggtgcatggtgggatactggggcttcggagactatggctgtcgaccatgtgactgtgcggggagctgtgaccctatcaccggagactgcatcagcagccacacagacatagactggtatcatgaagttcctgacttccgtcccgtgcacaataagagcgaaccagcctgggagtgggaggatgcgcaggggttttctgcacttctacactcaggtaaatgcgaatgtaaggaacagacattaggaaat

SEQ ID NO: 260 - protein, 515 aa, Homo sapiens
MGSCARLLLLWGCTVVAAGLSGVAGVSSRCEKACNPRMGNLALGRKLWADTTCGQNATELYCFYSENKDLTCRQPKCDKCNAAYPHLAHLPSAMADSSFRFPRTWWQSAEDVHREKIQLDLEAEFYFTHLIVMFKSPRPAAMVLDRSQDFGKTWKPYKYFATNCSATFGLEDDVVKKGAICTSKYSSPFPCTGGEVIFKALSPPHDTENPYSAKVQEQLKITNLRVQLLKRQSCPCQRNDLNEEPQHFTHYAIYDFIVKGSCFCNGHADQCIPVHGFRPVKAPGTFHMVHGKCMCKHNTAGSHCQHCAPLYNDRPWEAADGKTGAPNECRTRKCNGHADTCHFDVNVWEASGNRSGGVCDDCQHNTEGQYCQRCKPGFYRDLRRPFSAPDACKPCSCHPVGSAVLPANSVTFCDPSNGDCPCKPGVAGRRCDRCMVGYWGFGDYGCRPCDCAGSCDPITGDCISSHTDIDWYHEVPDFRPVHNKSEPAWEWEDAQGFSALLHSGKCECKEQTLGN

SEQ ID NO: 261 - DNA, 1545 bp, Homo sapiens
  CDS (1)..(1545)
atggggagctgcgcgcggctgctgctgctctggggctgcacggtggtggccgcaggactgagtggagtagctggagtgagttcccgctgtgaaaaagcctgcaaccctcggatgggaaatttggctttggggcgaaaactctgggcagacaccacctgcggtcagaatgctaccgaactgtactgcttctacagtgagaacaaggatctgacttgtcggcagcccaaatgtgacaagtgcaatgctgcctatcctcacctggctcacctgccatctgccatggcagactcatccttccggtttcctcgcacatggtggcagtctgcggaggatgtgcacagagaaaagatccagttagacctggaagctgaattctacttcactcacctaattgtgatgttcaagtcccccaggccggctgccatggtgctggaccgctcccaggactttgggaaaacatggaagccttataagtactttgcgactaactgctccgctacatttggcctggaagatgatgttgtcaagaagggcgctatttgtacttctaaatactccagtccttttccatgcactggaggagaggttattttcaaagctttgtcaccaccacacgatacagagaacccttacagtgccaaagttcaggagcagctgaagatcaccaaccttcgcgtgcagctgctgaaacgacagtcttgtccctgtcagagaaatgacctgaacgaagagcctcaacattttacacactatgcgatctatgatttcattgtcaagggcagctgcttctgcaatggccacgccgatcaatgcatacctgttcatggcttcagacctgtcaaggccccaggaacattccacatggtccatgggaagtgtatgtgtaagcacaacacagcaggcagccactgccagcactgtgccccgttatacaatgaccggccatgggaggcagctgatggcaaaacgggggctcccaacgagtgcagaacctgcaagtgtaatgggcatgctgatacctgtcacttcgacgttaatgtgtgggaggcatcagggagtcgtagtggtggtgtctgtgatgactgtcagcacaacacagaaggacagtattgccagaggtgcaagccaggcttctatcgtgacctgcggagacccttctcagctccagatgcttgcaaaccgtgttcctgccatccagtaggatcagctgtccttcctgccaactcagtgaccttctgcgaccccagcaatggtgactgcccttgcaagcctggggtggcagggcgacgttgtgacaggtgcatggtgggatactggggcttcggagactatggctgtcgaccatgtgactgtgcggggagctgtgaccctatcaccggagactgcatcagcagccacacagacatagactggtatcatgaagttcctgacttccgtcccgtgcacaataagagcgaaccagcctgggagtgggaggatgcgcaggggttttctgcacttctacactcaggtaaatgcgaatgtaaggaacagacattaggaaat

SEQ ID NO: 262 - protein, 515 aa, Homo sapiens
MGSCARLLLLWGCTVVAAGLSGVAGVSSRCEKACNPRMGNLALGRKLWADTTCGQNATELYCFYSENKDLTCRQPKCDKCNAAYPHLAHLPSAMADSSFRFPRTWWQSAEDVHREKIQLDLEAEFYFTHLIVMFKSPRPAAMVLDRSQDFGKTWKPYKYFATNCSATFGLEDDVVKKGAICTSKYSSPFPCTGGEVIFKALSPPHDTENPYSAKVQEQLKITNLRVQLLKRQSCPCQRNDLNEEPQHFTHYAIYDFIVKGSCFCNGHADQCIPVHGFRPVKAPGTFHMVHGKCMCKHNTAGSHCQHCAPLYNDRPWEAADGKTGAPNECRTCKCNGHADTCHFDVNVWEASGSRSGGVCDDCQHNTEGQYCQRCKPGFYRDLRRPFSAPDACKPCSCHPVGSAVLPANSVTFCDPSNGDCPCKPGVAGRRCDRCMVGYWGFGDYGCRPCDCAGSCDPITGDCISSHTDIDWYHEVPDFRPVHNKSEPAWEWEDAQGFSALLHSGKCECKEQTLGN

SEQ ID NO: 263 - DNA, 1545 bp, Homo sapiens
  CDS (1)..(1545)
atggggagctgcgcgcggctgctgctgctctggggctgcacggtggtggccgcaggactgagtggagtagctggagtgagttcccgctgtgaaaaagcctgcaaccctcggatgggaaatttggctttggggcgaaaactctgggcagacaccacctgcggtcagaatgctaccgaactgtactgcttctacagtgagaacaaggatctgacttgtcggcagcccaaatgtgacaagtgcaatgctgcctatcctcacctggctcacctgccatctgccatggcagactcatccttccggtttcctcgcacatggtggcagtctgcggaggatgtgcacagagaaaagatccagttagacctggaagctgaattctacttcactcacctaattgtgatgttcaagtcccccaggccggctgccatggtgctggaccgctcccaggactttgggaaaacatggaagccttataagtactttgcgactaactgctccgctacatttggcctggaagatgatgttgtcaagaagggcgctatttgtacttctaaatactccagtccttttccatgcactggaggagaggttattttcaaagctttgtcaccaccacacgatacagagaacccttacagtgccaaagttcaggagcagctgaagatcaccaaccttcgcgtgcagctgctgaaacgacagtcttgtccctgtcagagaaatgacctgaacgaagagcctcaacattttacacactatgcgatctatgatttcattgtcaagggcagctgcttctgcaatggccacgccgatcaatgcatacctgttcatggcttcagacctgtcaaggccccaggaacattccacatggtccatgggaagtgtatgtgtaagcacaacacagcaggcagccactgccagcactgtgccccgttatacaatgaccggccatgggaggcagctgatggcaaaacgggggctcccaacgagtgcagaacccgcaagtgtaatgggcatgctgatacctgtcacttcgacgttaatgtgtgggaggcatcagggagtcgtagtggtggtgtctgtgatgactgtcagcacaacacagaaggacagtattgccagaggtgcaagccaggcttctatcgtgacctgcggagacccttctcagctccagatgcttgcaaaccgtgttcctgccatccagtaggatcagctgtccttcctgccaactcagtgaccttctgcgaccccagcaatggtgactgcccttgcaagcctggggtggcagggcgacgttgtgacaggtgcatggtgggatactggggcttcggagactatggctgtcgaccatgtgactgtgcggggagctgtgaccctatcaccggagactgcatcagcagccacacagacatagactggtatcatgaagttcctgacttccgtcccgtgcacaataagagcgaaccagcctgggagtgggaggatgcgcaggggttttctgcacttctacactcaggtaaatgcgaatgtaaggaacagacattaggaaat

SEQ ID NO: 264 - protein, 515 aa, Homo sapiens
MGSCARLLLLWGCTVVAAGLSGVAGVSSRCEKACNPRMGNLALGRKLWADTTCGQNATELYCFYSENKDLTCRQPKCDKCNAAYPHLAHLPSAMADSSFRFPRTWWQSAEDVHREKIQLDLEAEFYFTHLIVMFKSPRPAAMVLDRSQDFGKTWKPYKYFATNCSATFGLEDDVVKKGAICTSKYSSPFPCTGGEVIFKALSPPHDTENPYSAKVQEQLKITNLRVQLLKRQSCPCQRNDLNEEPQHFTHYAIYDFIVKGSCFCNGHADQCIPVHGFRPVKAPGTFHMVHGKCMCKHNTAGSHCQHCAPLYNDRPWEAADGKTGAPNECRTRKCNGHADTCHFDVNVWEASGSRSGGVCDDCQHNTEGQYCQRCKPGFYRDLRRPFSAPDACKPCSCHPVGSAVLPANSVTFCDPSNGDCPCKPGVAGRRCDRCMVGYWGFGDYGCRPCDCAGSCDPITGDCISSHTDIDWYHEVPDFRPVHNKSEPAWEWEDAQGFSALLHSGKCECKEQTLGN

SEQ ID NO: 265 - DNA, 1518 bp, Homo sapiens
  CDS (1)..(1518)
ctgagtggagtagctggagtgagttcccgctgtgaaaaagcctgcaaccctcggatgggaaatttggctttggggcgaaaactctgggcagacaccacctgcggtcagaatgctaccgaactgtactgcttctacagtgagaacacggatctgacttgtcggcagcccaaatgtgacaagtgcaatgctgcctatcctcacctggctcacctgccatctgccatggcagactcatccttccggtttcctcgcacatggtggcagtctgcggaggatgtgcacagagaaaagatccagttagacctggaagctgaattctacttcactcacctaattgtgatgttcaagtcccccaggccggctgccatggtgctggaccgctcccaggactttgggaaaacatggaagccttataagtactttgcgactaactgctccgctacatttggcctggaagatgatgttgtcaagaagggcgctatttgtactcctaaatactccagtccttttccatgcactggaggagaggttattttcaaagctttgtcaccaccatacgatacagagaacccttacagtgccaaagttcaggagcagctgaagatcaccaaccttcgcgtgcagctgctgaaacgacagtcttatccctgtcagagaaatgacctgaacgaagagcctcaacattttacacactatgcgatctatgatttcattgtcaagggcagctgcttctgcaatggccacgccgatcaatgcatacctgttcatggcttcagacctgtcaaggccccaggaacattccacatggtccatgggaagtgtatgtgtaagcacaacacagcaggcagccactgccagcactgtgccccgttatacaatgaccggccatgggaggcagctgatggcaaaacgggggctcccaacgagtgcagaacccgcaagtgtaatgggcatgctgatacctgtcacttcgacgttaatgtgtgggaggcatcagggagtcgtagtggtggtgtctgtgatgactgtcagcacaacacagaaggacagtattgccagaggtgcaagccaggcttctatcgtgacctgcggagacccttctcagctccagatgcttgcaaaccgtgttcctgccatccagtaggatcagctgtccttcctgccaactcagtgaccttctgcgaccccagcaatggtgactgcccttgcaagcctggggtggcagggcgacgttgtgacaggtgcatggtgggatactggggcttcggagactatggctgtcgaccatgtgactgtgcggggagctgtgaccctatcaccggagactgcatcagcagccacacagacatagactggtatcatgaagttcctgacttccgtcccgtgcacaataagagcgaaccagcctgggagtgggaggatgcgcaggggttttctgcacttctacactcaggtaaatgcgaatgtaaggaacagacattaggaaagggatccgagctcggtaccaagcttacgtag

SEQ ID NO: 266 - protein, 505 aa, Homo sapiens
LSGVAGVSSRCEKACNPRMGNLALGRKLWADTTCGQNATELYCFYSENTDLTCRQPKCDKCNAAYPHLAHLPSAMADSSFRFPRTWWQSAEDVHREKIQLDLEAEFYFTHLIVMFKSPRPAAMVLDRSQDFGKTWKPYKYFATNCSATFGLEDDVVKKGAICTPKYSSPFPCTGGEVIFKALSPPYDTENPYSAKVQEQLKITNLRVQLLKRQSYPCQRNDLNEEPQHFTHYAIYDFIVKGSCFCNGHADQCIPVHGFRPVKAPGTFHMVHGKCMCKHNTAGSHCQHCAPLYNDRPWEAADGKTGAPNECRTRKCNGHADTCHFDVNVWEASGSRSGGVCDDCQHNTEGQYCQRCKPGFYRDLRRPFSAPDACKPCSCHPVGSAVLPANSVTFCDPSNGDCPCKPGVAGRRCDRCMVGYWGFGDYGCRPCDCAGSCDPITGDCISSHTDIDWYHEVPDFRPVHNKSEPAWEWEDAQGFSALLHSGKCECKEQTLGKGSELGTKLT

SEQ ID NO: 267 - DNA, 1488 bp, Homo sapiens
  CDS (1)..(1488)
ctgagtggagtagctggagtgagttcccgctgtgaaaaagcctgcaaccctcggatgggaaatttggctttggggcgaaaactctgggcagacaccacctgcggtcagaatgctaccgaactgtactgcttctacagtgagaacacggatctgacttgtcggcagcccaaatgtgacaagtgcaatgctgcctatcctcacctggctcacctgccatctgccatggcagactcatccttccggtttcctcgcacatggtggcagtctgcggaggatgtgcacagagaaaagatccagttagacctggaagctgaattctacttcactcacctaattgtgatgttcaagtcccccaggccggctgccatggtgctggaccgctcccaggactttgggaaaacatggaagccttataagtactttgcgactaactgctccgctacatttggcctggaagatgatgttgtcaagaagggcgctatttgtactcctaaatactccagtccttttccatgcactggaggagaggttattttcaaagctttgtcaccaccatacgatacagagaacccttacagtgccaaagttcaggagcagctgaagatcaccaaccttcgcgtgcagctgctgaaacgacagtcttatccctgtcagagaaatgacctgaacgaagagcctcaacattttacacactatgcgatctatgatttcattgtcaagggcagctgcttctgcaatggccacgccgatcaatgcatacctgttcatggcttcagacctgtcaaggccccaggaacattccacatggtccatgggaagtgtatgtgtaagcacaacacagcaggcagccactgccagcactgtgccccgttatacaatgaccggccatgggaggcagctgatggcaaaacgggggctcccaacgagtgcagagcccgcaagtgtaatgggcatgctgatacctgtcacttcgacgttaatgtgtgggaggcatcagggagtcgtagtggtggtgtctgtgatgactgtcagcacaacacagaaggacagtattgccagaggtgcaagccaggcttctatcgtgacctgcggagacccttctcagctccagatgcttgcaaaccgtgttcctgccatccagtaggatcagctgtccttcctgccaactcagtgaccttctgcgaccccagcaatggtgactgcccttgcaagcctggggtggcagggcgacgttgtgacaggtgcatggtgggatactggggcttcggagactatggctgtcgaccatgtgactgtgcggggagctgtgaccctatcaccggagactgcatcagcagccacacagacatagactggtatcatgaagttcctgacttccgtcccgtgcacaataagagcgaaccagcctgggagtgggaggatgcgcaggggttttctgcacttctacactcaggtaaatgcgaatgtaaggaacagacattaggaaag

SEQ ID NO: 268 - protein, 496 aa, Homo sapiens
LSGVAGVSSRCEKACNPRMGNLALGRKLWADTTCGQNATELYCFYSENTDLTCRQPKCDKCNAAYPHLAHLPSAMADSSFRFPRTWWQSAEDVHREKIQLDLEAEFYFTHLIVMFKSPRPAAMVLDRSQDFGKTWKPYKYFATNCSATFGLEDDVVKKGAICTPKYSSPFPCTGGEVIFKALSPPYDTENPYSAKVQEQLKITNLRVQLLKRQSYPCQRNDLNEEPQHFTHYAIYDFIVKGSCFCNGHADQCIPVHGFRPVKAPGTFHMVHGKCMCKHNTAGSHCQHCAPLYNDRPWEAADGKTGAPNECRARKCNGHADTCHFDVNVWEASGSRSGGVCDDCQHNTEGQYCQRCKPGFYRDLRRPFSAPDACKPCSCHPVGSAVLPANSVTFCDPSNGDCPCKPGVAGRRCDRCMVGYWGFGDYGCRPCDCAGSCDPITGDCISSHTDIDWYHEVPDFRPVHNKSEPAWEWEDAQGFSALLHSGKCECKEQTLGK

SEQ ID NO: 269 - DNA, 1488 bp, Homo sapiens
  CDS (1)..(1488)
ctgagtggagtagctggagtgagttcccgctgtgaaaaagcctgcaaccctcggatgggaaatttggctttggggcgaaaactctgggcagacaccacctgcggtcagaatgctaccgaactgtactgcttctacagtgagaacacggatctgacttgtcggcagcccaaatgtgacaagtgcaatgctgcctatcctcacctggctcacctgccatctgccatggcagactcatccttccggtttcctcgcacatggtggcagtctgcggaggatgtgcacagagaaaagatccagttagacctggaagctgaattctacttcactcacctaattgtgatgttcaagtcccccaggccggctgccatggtgctggaccgctcccaggactttgggaaaacatggaagccttataagtactttgcgactaactgctccgctacatttggcctggaagatgatgttgtcaagaagggcgctatttgtactcctaaatactccagtccttttccatgcactggaggagaggttattttcaaagctttgtcaccaccatacgatacagagaacccttacagtgccaaagttcaggagcagctgaagatcaccaaccttcgcgtgcagctgctgaaacgacagtcttatccctgtcagagaaatgacctgaacgaagagcctcaacattttacacactatgcgatctatgatttcattgtcaagggcagctgcttctgcaatggccacgccgatcaatgcatacctgttcatggcttcagacctgtcaaggccccaggaacattccacatggtccatgggaagtgtatgtgtaagcacaacacagcaggcagccactgccagcactgtgccccgttatacaatgaccggccatgggaggcagctgatggcaaaacgggggctcccaacgagtgcagaacctgcaagtgtaatgggcatgctgatacctgtcacttcgacgttaatgtgtgggaggcatcagggagtcgtagtggtggtgtctgtgatgactgtcagcacaacacagaaggacagtattgccagaggtgcaagccaggcttctatcgtgacctgcggagacccttctcagctccagatgcttgcaaaccgtgttcctgccatccagtaggatcagctgtccttcctgccaactcagtgaccttctgcgaccccagcaatggtgactgcccttgcaagcctggggtggcagggcgacgttgtgacaggtgcatggtgggatactggggcttcggagactatggctgtcgaccatgtgactgtgcggggagctgtgaccctatcaccggagactgcatcagcagccacacagacatagactggtatcatgaagttcctgacttccgtcccgtgcacaataagagcgaaccagcctgggagtgggaggatgcgcaggggttttctgcacttctacactcaggtaaatgcgaatgtaaggaacagacattaggaaag

SEQ ID NO: 270 - protein, 496 aa, Homo sapiens
LSGVAGVSSRCEKACNPRMGNLALGRKLWADTTCGQNATELYCFYSENTDLTCRQPKCDKCNAAYPHLAHLPSAMADSSFRFPRTWWQSAEDVHREKIQLDLEAEFYFTHLIVMFKSPRPAAMVLDRSQDFGKTWKPYKYFATNCSATFGLEDDVVKKGAICTPKYSSPFPCTGGEVIFKALSPPYDTENPYSAKVQEQLKITNLRVQLLKRQSYPCQRNDLNEEPQHFTHYAIYDFIVKGSCFCNGHADQCIPVHGFRPVKAPGTFHMVHGKCMCKHNTAGSHCQHCAPLYNDRPWEAADGKTGAPNECRTCKCNGHADTCHFDVNVWEASGSRSGGVCDDCQHNTEGQYCQRCKPGFYRDLRRPFSAPDACKPCSCHPVGSAVLPANSVTFCDPSNGDCPCKPGVAGRRCDRCMVGYWGFGDYGCRPCDCAGSCDPITGDCISSHTDIDWYHEVPDFRPVHNKSEPAWEWEDAQGFSALLHSGKCECKEQTLGK

SEQ ID NO: 271 - DNA, 1488 bp, Homo sapiens
  CDS (1)..(1488)
ctgagtggagtagctggagtgagttcccgctgtgaaaaagcctgcaaccctcggatgggaaatttggctttggggcgaaaactctgggcagacaccacctgcggtcagaatgctaccgaactgtactgcttctacagtgagaacacggatctgacttgtcggcagcccaaatgtgacaagtgcaatgctgcctatcctcacctggctcacctgccatctgccatggcagactcatccttccggtttcctcgcacatggtggcagtctgcggaggatgtgcacagagaaaagatccagttagacctggaagctgaattctacttcactcacctaattgtgatgttcaagtcccccaggccggctgccatggtgctggaccgctcccaggactttgggaaaacatggaagccttataagtactttgcgactaactgctccgctacatttggcctggaagatgatgttgtcaagaagggcgctatttgtactcctaaatactccagtccttttccatgcactggaggagaggttattttcaaagctttgtcaccaccatacgatacagagaacccttacagtgccaaagttcaggagcagctgaagatcaccaaccttcgcgtgcagctgctgaaacgacagtcttatccctgtcagagaaatgacctgaacgaagagcctcaacattttacacactatgcgatctatgatttcattgtcaagggcagctgcttctgcaatggccacgccgatcaatgcatacctgttcatggcttcagacctgtcaaggccccaggaacattccacatggtccatgggaagtgtatgtgtaagcacaacacagcaggcagccactgccagcactgtgccccgttatacaatgaccggccatgggaggcagctgatggcaaaacgggggctcccaacgagtgcagaacccgcaagtgtaatgggcatgctgatacctgtcacttcgacgttaatgtgtgggaggcatcagggaatcgtagtggtggtgtctgtgatgactgtcagcacaacacagaaggacagtattgccagaggtgcaagccaggcttctatcgtgacctgcggagacccttctcagctccagatgcttgcaaaccgtgttcctgccatccagtaggatcagctgtccttcctgccaactcagtgaccttctgcgaccccagcaatggtgactgcccttgcaagcctggggtggcagggcgacgttgtgacaggtgcatggtgggatactggggcttcggagactatggctgtcgaccatgtgactgtgcggggagctgtgaccctatcaccggagactgcatcagcagccacacagacatagactggtatcatgaagttcctgacttccgtcccgtgcacaataagagcgaaccagcctgggagtgggaggatgcgcaggggttttctgcacttctacactcaggtaaatgcgaatgtaaggaacagacattaggaaag

SEQ ID NO: 272 - protein, 496 aa, Homo sapiens
LSGVAGVSSRCEKACNPRMGNLALGRKLWADTTCGQNATELYCFYSENTDLTCRQPKCDKCNAAYPHLAHLPSAMADSSFRFPRTWWQSAEDVHREKIQLDLEAEFYFTHLIVMFKSPRPAAMVLDRSQDFGKTWKPYKYFATNCSATFGLEDDVVKKGAICTPKYSSPFPCTGGEVIFKALSPPYDTENPYSAKVQEQLKITNLRVQLLKRQSYPCQRNDLNEEPQHFTHYAIYDFIVKGSCFCNGHADQCIPVHGFRPVKAPGTFHMVHGKCMCKHNTAGSHCQHCAPLYNDRPWEAADGKTGAPNECRTRKCNGHADTCHFDVNVWEASGNRSGGVCDDCQHNTEGQYCQRCKPGFYRDLRRPFSAPDACKPCSCHPVGSAVLPANSVTFCDPSNGDCPCKPGVAGRRCDRCMVGYWGFGDYGCRPCDCAGSCDPITGDCISSHTDIDWYHEVPDFRPVHNKSEPAWEWEDAQGFSALLHSGKCECKEQTLGK

SEQ ID NO: 273 - DNA, 1488 bp, Homo sapiens
  CDS (1)..(1488)
ctgagtggagtagctggagtgagttcccgctgtgaaaaagcctgcaaccctcggatgggaaatttggctttggggcgaaaactctgggcagacaccacctgcggtcagaatgctaccgaactgtactgcttctacagtgagaacacggatctgacttgtcggcagcccaaatgtgacaagtgcaatgctgcctatcctcacctggctcacctgccatctgccatggcagactcatccttccggtttcctcgcacatggtggcagtctgcggaggatgtgcacagagaaaagatccagttagacctggaagctgaattctacttcactcacctaattgtgatgttcaagtcccccaggccggctgccatggtgctggaccgctcccaggactttgggaaaacatggaagccttataagtactttgcgactaactgctccgctacatttggcctggaagatgatgttgtcaagaagggcgctatttgtactcctaaatactccagtccttttccatgcactggaggagaggttattttcaaagctttgtcaccaccatacgatacagagaacccttacagtgccaaagttcaggagcagctgaagatcaccaaccttcgcgtgcagctgctgaaacgacagtcttatccctgtcagagaaatgacctgaacgaagagcctcaacattttacacactatgcgatctatgatttcattgtcaagggcagctgcttctgcaatggccacgccgatcaatgcatacctgttcatggcttcagacctgtcaaggccccaggaacattccacatggtccatgggaagtgtatgtgtaagcacaacacagcaggcagccactgccagcactgtgccccgttatacaatgaccggccatgggaggcagctgatggcaaaacgggggctcccaacgagtgcagaacccgcaagtgtaatgggcatgctgatacctgtcacttcgacgttaatgtgtgggaggcatcagggagtcgtagtggtggtgtctgtgatgactgtcagcacaacacagaaggacagtattgccagaggtgcaagccaggcttctatcgtgacctgcggagacccttctcagctccagatgcttgcaaaccgtgttcctgccatccagtaggatcagctgtccttcctgccaactcagtgaccttctgcgaccccagcaatggtgactgcccttgcaagcctggggtggcagggcgacgttgtgacaggtgcatggtgggatactggggcttcggagactatggctgtcgaccatgtgactgtgcggggagctgtgaccctatcaccggagactgcatcagcagccacacagacatagactggtgtcatgaagttcctgacttccgtcccgtgcacaataagagcgaaccagcctgggagtgggaggatgcgcaggggttttctgcacttctacactcaggtaaatgcgaatgtaaggaacagacattaggaaag

SEQ ID NO: 274 - protein, 496 aa, Homo sapiens
LSGVAGVSSRCEKACNPRMGNLALGRKLWADTTCGQNATELYCFYSENTDLTCRQPKCDKCNAAYPHLAHLPSAMADSSFRFPRTWWQSAEDVHREKIQLDLEAEFYFTHLIVMFKSPRPAAMVLDRSQDFGKTWKPYKYFATNCSATFGLEDDVVKKGAICTPKYSSPFPCTGGEVIFKALSPPYDTENPYSAKVQEQLKITNLRVQLLKRQSYPCQRNDLNEEPQHFTHYAIYDFIVKGSCFCNGHADQCIPVHGFRPVKAPGTFHMVHGKCMCKHNTAGSHCQHCAPLYNDRPWEAADGKTGAPNECRTRKCNGHADTCHFDVNVWEASGSRSGGVCDDCQHNTEGQYCQRCKPGFYRDLRRPFSAPDACKPCSCHPVGSAVLPANSVTFCDPSNGDCPCKPGVAGRRCDRCMVGYWGFGDYGCRPCDCAGSCDPITGDCISSHTDIDWCHEVPDFRPVHNKSEPAWEWEDAQGFSALLHSGKCECKEQTLGK

SEQ ID NO: 275 - DNA, 1488 bp, Homo sapiens
  CDS (1)..(1488)
ctgagtggagtagctggagtgagttcccgctgtgaaaaagcctgcaaccctcggatgggaaatttggctttggggcgaaaactctgggcagacaccacctgcggtcagaatgctaccgaactgtactgcttctacagtgagaacacggatctgacttgtcggcagcccaaatgtgacaagtgcaatgctgcctatcctcacctggctcacctgccatctgccatggcagactcatccttccggtttcctcgcacatggtggcagtctgcggaggatgtgcacagagaaaagatccagttagacctggaagctgaattctacttcactcacctaattgtgatgttcaagtcccccaggccggctgccatggtgctggaccgctcccaggactttgggaaaacatggaagccttataagtactttgcgactaactgctccgctacatttggcctggaagatgatgttgtcaagaagggcgctatttgtactcctaaatactccagtccttttccatgcactggaggagaggttattttcaaagctttgtcaccaccatacgatacagagaacccttacagtgccaaagttcaggagcagctgaagatcaccaaccttcgcgtgcagctgctgaaacgacagtcttatccctgtcagagaaatgacctgaacgaagagcctcaacattttacacactatgcgatctatgatttcattgtcaagggcagctgcttctgcaatggccacgccgatcaatgcatacctgttcatggcttcagacctgtcaaggccccaggaacattccacatggtccatgggaagtgtatgtgtaagcacaacacagcaggcagccactgccagcactgtgccccgttatacaatgaccggccatgggaggcagctgatggcaaaacgggggctcccaacgagtgcagagcctgcaagtgtaatgggcatgctgatacctgtcacttcgacgttaatgtgtgggaggcatcagggagtcgtagtggtggtgtctgtgatgactgtcagcacaacacagaaggacagtattgccagaggtgcaagccaggcttctatcgtgacctgcggagacccttctcagctccagatgcttgcaaaccgtgttcctgccatccagtaggatcagctgtccttcctgccaactcagtgaccttctgcgaccccagcaatggtgactgcccttgcaagcctggggtggcagggcgacgttgtgacaggtgcatggtgggatactggggcttcggagactatggctgtcgaccatgtgactgtgcggggagctgtgaccctatcaccggagactgcatcagcagccacacagacatagactggtatcatgaagttcctgacttccgtcccgtgcacaataagagcgaaccagcctgggagtgggaggatgcgcaggggttttctgcacttctacactcaggtaaatgcgaatgtaaggaacagacattaggaaag

SEQ ID NO: 276 - protein, 496 aa, Homo sapiens
LSGVAGVSSRCEKACNPRMGNLALGRKLWADTTCGQNATELYCFYSENTDLTCRQPKCDKCNAAYPHLAHLPSAMADSSFRFPRTWWQSAEDVHREKIQLDLEAEFYFTHLIVMFKSPRPAAMVLDRSQDFGKTWKPYKYFATNCSATFGLEDDVVKKGAICTPKYSSPFPCTGGEVIFKALSPPYDTENPYSAKVQEQLKITNLRVQLLKRQSYPCQRNDLNEEPQHFTHYAIYDFIVKGSCFCNGHADQCIPVHGFRPVKAPGTFHMVHGKCMCKHNTAGSHCQHCAPLYNDRPWEAADGKTGAPNECRACKCNGHADTCHFDVNVWEASGSRSGGVCDDCQHNTEGQYCQRCKPGFYRDLRRPFSAPDACKPCSCHPVGSAVLPANSVTFCDPSNGDCPCKPGVAGRRCDRCMVGYWGFGDYGCRPCDCAGSCDPITGDCISSHTDIDWYHEVPDFRPVHNKSEPAWEWEDAQGFSALLHSGKCECKEQTLGK

SEQ ID NO: 277 - DNA, 1488 bp, Homo sapiens
  CDS (1)..(1488)
ctgagtggagtagctggagtgagttcccgctgtgaaaaagcctgcaaccctcggatgggaaatttggctttggggcgaaaactctgggcagacaccacctgcggtcagaatgctaccgaactgtactgcttctacagtgagaacacggatctgacttgtcggcagcccaaatgtgacaagtgcaatgctgcctatcctcacctggctcacctgccatctgccatggcagactcatccttccggtttcctcgcacatggtggcagtctgcggaggatgtgcacagagaaaagatccagttagacctggaagctgaattctacttcactcacctaattgtgatgttcaagtcccccaggccggctgccatggtgctggaccgctcccaggactttgggaaaacatggaagccttataagtactttgcgactaactgctccgctacatttggcctggaagatgatgttgtcaagaagggcgctatttgtactcctaaatactccagtccttttccatgcactggaggagaggttattttcaaagctttgtcaccaccatacgatacagagaacccttacagtgccaaagttcaggagcagctgaagatcaccaaccttcgcgtgcagctgctgaaacgacagtcttatccctgtcagagaaatgacctgaacgaagagcctcaacattttacacactatgcgatctatgatttcattgtcaagggcagctgcttctgcaatggccacgccgatcaatgcatacctgttcatggcttcagacctgtcaaggccccaggaacattccacatggtccatgggaagtgtatgtgtaagcacaacacagcaggcagccactgccagcactgtgccccgttatacaatgaccggccatgggaggcagctgatggcaaaacgggggctcccaacgagtgcagagcccgcaagtgtaatgggcatgctgatacctgtcacttcgacgttaatgtgtgggaggcatcagggaatcgtagtggtggtgtctgtgatgactgtcagcacaacacagaaggacagtattgccagaggtgcaagccaggcttctatcgtgacctgcggagacccttctcagctccagatgcttgcaaaccgtgttcctgccatccagtaggatcagctgtccttcctgccaactcagtgaccttctgcgaccccagcaatggtgactgcccttgcaagcctggggtggcagggcgacgttgtgacaggtgcatggtgggatactggggcttcggagactatggctgtcgaccatgtgactgtgcggggagctgtgaccctatcaccggagactgcatcagcagccacacagacatagactggtatcatgaagttcctgacttccgtcccgtgcacaataagagcgaaccagcctgggagtgggaggatgcgcaggggttttctgcacttctacactcaggtaaatgcgaatgtaaggaacagacattaggaaag

SEQ ID NO: 278 - protein, 496 aa, Homo sapiens
LSGVAGVSSRCEKACNPRMGNLALGRKLWADTTCGQNATELYCFYSENTDLTCRQPKCDKCNAAYPHLAHLPSAMADSSFRFPRTWWQSAEDVHREKIQLDLEAEFYFTHLIVMFKSPRPAAMVLDRSQDFGKTWKPYKYFATNCSATFGLEDDVVKKGAICTPKYSSPFPCTGGEVIFKALSPPYDTENPYSAKVQEQLKITNLRVQLLKRQSYPCQRNDLNEEPQHFTHYAIYDFIVKGSCFCNGHADQCIPVHGFRPVKAPGTFHMVHGKCMCKHNTAGSHCQHCAPLYNDRPWEAADGKTGAPNECRARKCNGHADTCHFDVNVWEASGNRSGGVCDDCQHNTEGQYCQRCKPGFYRDLRRPFSAPDACKPCSCHPVGSAVLPANSVTFCDPSNGDCPCKPGVAGRRCDRCMVGYWGFGDYGCRPCDCAGSCDPITGDCISSHTDIDWYHEVPDFRPVHNKSEPAWEWEDAQGFSALLHSGKCECKEQTLGK

SEQ ID NO: 279 - DNA, 1488 bp, Homo sapiens
  CDS (1)..(1488)
ctgagtggagtagctggagtgagttcccgctgtgaaaaagcctgcaaccctcggatgggaaatttggctttggggcgaaaactctgggcagacaccacctgcggtcagaatgctaccgaactgtactgcttctacagtgagaacacggatctgacttgtcggcagcccaaatgtgacaagtgcaatgctgcctatcctcacctggctcacctgccatctgccatggcagactcatccttccggtttcctcgcacatggtggcagtctgcggaggatgtgcacagagaaaagatccagttagacctggaagctgaattctacttcactcacctaattgtgatgttcaagtcccccaggccggctgccatggtgctggaccgctcccaggactttgggaaaacatggaagccttataagtactttgcgactaactgctccgctacatttggcctggaagatgatgttgtcaagaagggcgctatttgtactcctaaatactccagtccttttccatgcactggaggagaggttattttcaaagctttgtcaccaccatacgatacagagaacccttacagtgccaaagttcaggagcagctgaagatcaccaaccttcgcgtgcagctgctgaaacgacagtcttatccctgtcagagaaatgacctgaacgaagagcctcaacattttacacactatgcgatctatgatttcattgtcaagggcagctgcttctgcaatggccacgccgatcaatgcatacctgttcatggcttcagacctgtcaaggccccaggaacattccacatggtccatgggaagtgtatgtgtaagcacaacacagcaggcagccactgccagcactgtgccccgttatacaatgaccggccatgggaggcagctgatggcaaaacgggggctcccaacgagtgcagagcccgcaagtgtaatgggcatgctgatacctgtcacttcgacgttaatgtgtgggaggcatcagggagtcgtagtggtggtgtctgtgatgactgtcagcacaacacagaaggacagtattgccagaggtgcaagccaggcttctatcgtgacctgcggagacccttctcagctccagatgcttgcaaaccgtgttcctgccatccagtaggatcagctgtccttcctgccaactcagtgaccttctgcgaccccagcaatggtgactgcccttgcaagcctggggtggcagggcgacgttgtgacaggtgcatggtgggatactggggcttcggagactatggctgtcgaccatgtgactgtgcggggagctgtgaccctatcaccggagactgcatcagcagccacacagacatagactggtgtcatgaagttcctgacttccgtcccgtgcacaataagagcgaaccagcctgggagtgggaggatgcgcaggggttttctgcacttctacactcaggtaaatgcgaatgtaaggaacagacattaggaaag

SEQ ID NO: 280 - protein, 496 aa, Homo sapiens
LSGVAGVSSRCEKACNPRMGNLALGRKLWADTTCGQNATELYCFYSENTDLTCRQPKCDKCNAAYPHLAHLPSAMADSSFRFPRTWWQSAEDVHREKIQLDLEAEFYFTHLIVMFKSPRPAAMVLDRSQDFGKTWKPYKYFATNCSATFGLEDDVVKKGAICTPKYSSPFPCTGGEVIFKALSPPYDTENPYSAKVQEQLKITNLRVQLLKRQSYPCQRNDLNEEPQHFTHYAIYDFIVKGSCFCNGHADQCIPVHGFRPVKAPGTFHMVHGKCMCKHNTAGSHCQHCAPLYNDRPWEAADGKTGAPNECRARKCNGHADTCHFDVNVWEASGSRSGGVCDDCQHNTEGQYCQRCKPGFYRDLRRPFSAPDACKPCSCHPVGSAVLPANSVTFCDPSNGDCPCKPGVAGRRCDRCMVGYWGFGDYGCRPCDCAGSCDPITGDCISSHTDIDWCHEVPDFRPVHNKSEPAWEWEDAQGFSALLHSGKCECKEQTLGK

SEQ ID NO: 281 - DNA, 1488 bp, Homo sapiens
  CDS (1)..(1488)
ctgagtggagtagctggagtgagttcccgctgtgaaaaagcctgcaaccctcggatgggaaatttggctttggggcgaaaactctgggcagacaccacctgcggtcagaatgctaccgaactgtactgcttctacagtgagaacacggatctgacttgtcggcagcccaaatgtgacaagtgcaatgctgcctatcctcacctggctcacctgccatctgccatggcagactcatccttccggtttcctcgcacatggtggcagtctgcggaggatgtgcacagagaaaagatccagttagacctggaagctgaattctacttcactcacctaattgtgatgttcaagtcccccaggccggctgccatggtgctggaccgctcccaggactttgggaaaacatggaagccttataagtactttgcgactaactgctccgctacatttggcctggaagatgatgttgtcaagaagggcgctatttgtactcctaaatactccagtccttttccatgcactggaggagaggttattttcaaagctttgtcaccaccatacgatacagagaacccttacagtgccaaagttcaggagcagctgaagatcaccaaccttcgcgtgcagctgctgaaacgacagtcttatccctgtcagagaaatgacctgaacgaagagcctcaacattttacacactatgcgatctatgatttcattgtcaagggcagctgcttctgcaatggccacgccgatcaatgcatacctgttcatggcttcagacctgtcaaggccccaggaacattccacatggtccatgggaagtgtatgtgtaagcacaacacagcaggcagccactgccagcactgtgccccgttatacaatgaccggccatgggaggcagctgatggcaaaacgggggctcccaacgagtgcagaacctgcaagtgtaatgggcatgctgatacctgtcacttcgacgttaatgtgtgggaggcatcagggaatcgtagtggtggtgtctgtgatgactgtcagcacaacacagaaggacagtattgccagaggtgcaagccaggcttctatcgtgacctgcggagacccttctcagctccagatgcttgcaaaccgtgttcctgccatccagtaggatcagctgtccttcctgccaactcagtgaccttctgcgaccccagcaatggtgactgcccttgcaagcctggggtggcagggcgacgttgtgacaggtgcatggtgggatactggggcttcggagactatggctgtcgaccatgtgactgtgcggggagctgtgaccctatcaccggagactgcatcagcagccacacagacatagactggtatcatgaagttcctgacttccgtcccgtgcacaataagagcgaaccagcctgggagtgggaggatgcgcaggggttttctgcacttctacactcaggtaaatgcgaatgtaaggaacagacattaggaaag

SEQ ID NO: 282 - protein, 496 aa, Homo sapiens
LSGVAGVSSRCEKACNPRMGNLALGRKLWADTTCGQNATELYCFYSENTDLTCRQPKCDKCNAAYPHLAHLPSAMADSSFRFPRTWWQSAEDVHREKIQLDLEAEFYFTHLIVMFKSPRPAAMVLDRSQDFGKTWKPYKYFATNCSATFGLEDDVVKKGAICTPKYSSPFPCTGGEVIFKALSPPYDTENPYSAKVQEQLKITNLRVQLLKRQSYPCQRNDLNEEPQHFTHYAIYDFIVKGSCFCNGHADQCIPVHGFRPVKAPGTFHMVHGKCMCKHNTAGSHCQHCAPLYNDRPWEAADGKTGAPNECRTCKCNGHADTCHFDVNVWEASGNRSGGVCDDCQHNTEGQYCQRCKPGFYRDLRRPFSAPDACKPCSCHPVGSAVLPANSVTFCDPSNGDCPCKPGVAGRRCDRCMVGYWGFGDYGCRPCDCAGSCDPITGDCISSHTDIDWYHEVPDFRPVHNKSEPAWEWEDAQGFSALLHSGKCECKEQTLGK

SEQ ID NO: 283 - DNA, 1488 bp, Homo sapiens
  CDS (1)..(1488)
ctgagtggagtagctggagtgagttcccgctgtgaaaaagcctgcaaccctcggatgggaaatttggctttggggcgaaaactctgggcagacaccacctgcggtcagaatgctaccgaactgtactgcttctacagtgagaacacggatctgacttgtcggcagcccaaatgtgacaagtgcaatgctgcctatcctcacctggctcacctgccatctgccatggcagactcatccttccggtttcctcgcacatggtggcagtctgcggaggatgtgcacagagaaaagatccagttagacctggaagctgaattctacttcactcacctaattgtgatgttcaagtcccccaggccggctgccatggtgctggaccgctcccaggactttgggaaaacatggaagccttataagtactttgcgactaactgctccgctacatttggcctggaagatgatgttgtcaagaagggcgctatttgtactcctaaatactccagtccttttccatgcactggaggagaggttattttcaaagctttgtcaccaccatacgatacagagaacccttacagtgccaaagttcaggagcagctgaagatcaccaaccttcgcgtgcagctgctgaaacgacagtcttatccctgtcagagaaatgacctgaacgaagagcctcaacattttacacactatgcgatctatgatttcattgtcaagggcagctgcttctgcaatggccacgccgatcaatgcatacctgttcatggcttcagacctgtcaaggccccaggaacattccacatggtccatgggaagtgtatgtgtaagcacaacacagcaggcagccactgccagcactgtgccccgttatacaatgaccggccatgggaggcagctgatggcaaaacgggggctcccaacgagtgcagaacctgcaagtgtaatgggcatgctgatacctgtcacttcgacgttaatgtgtgggaggcatcagggagtcgtagtggtggtgtctgtgatgactgtcagcacaacacagaaggacagtattgccagaggtgcaagccaggcttctatcgtgacctgcggagacccttctcagctccagatgcttgcaaaccgtgttcctgccatccagtaggatcagctgtccttcctgccaactcagtgaccttctgcgaccccagcaatggtgactgcccttgcaagcctggggtggcagggcgacgttgtgacaggtgcatggtgggatactggggcttcggagactatggctgtcgaccatgtgactgtgcggggagctgtgaccctatcaccggagactgcatcagcagccacacagacatagactggtgtcatgaagttcctgacttccgtcccgtgcacaataagagcgaaccagcctgggagtgggaggatgcgcaggggttttctgcacttctacactcaggtaaatgcgaatgtaaggaacagacattaggaaag

SEQ ID NO: 284 - protein, 496 aa, Homo sapiens
LSGVAGVSSRCEKACNPRMGNLALGRKLWADTTCGQNATELYCFYSENTDLTCRQPKCDKCNAAYPHLAHLPSAMADSSFRFPRTWWQSAEDVHREKIQLDLEAEFYFTHLIVMFKSPRPAAMVLDRSQDFGKTWKPYKYFATNCSATFGLEDDVVKKGAICTPKYSSPFPCTGGEVIFKALSPPYDTENPYSAKVQEQLKITNLRVQLLKRQSYPCQRNDLNEEPQHFTHYAIYDFIVKGSCFCNGHADQCIPVHGFRPVKAPGTFHMVHGKCMCKHNTAGSHCQHCAPLYNDRPWEAADGKTGAPNECRTCKCNGHADTCHFDVNVWEASGSRSGGVCDDCQHNTEGQYCQRCKPGFYRDLRRPFSAPDACKPCSCHPVGSAVLPANSVTFCDPSNGDCPCKPGVAGRRCDRCMVGYWGFGDYGCRPCDCAGSCDPITGDCISSHTDIDWCHEVPDFRPVHNKSEPAWEWEDAQGFSALLHSGKCECKEQTLGK

SEQ ID NO: 285 - DNA, 1488 bp, Homo sapiens
  CDS (1)..(1488)
ctgagtggagtagctggagtgagttcccgctgtgaaaaagcctgcaaccctcggatgggaaatttggctttggggcgaaaactctgggcagacaccacctgcggtcagaatgctaccgaactgtactgcttctacagtgagaacacggatctgacttgtcggcagcccaaatgtgacaagtgcaatgctgcctatcctcacctggctcacctgccatctgccatggcagactcatccttccggtttcctcgcacatggtggcagtctgcggaggatgtgcacagagaaaagatccagttagacctggaagctgaattctacttcactcacctaattgtgatgttcaagtcccccaggccggctgccatggtgctggaccgctcccaggactttgggaaaacatggaagccttataagtactttgcgactaactgctccgctacatttggcctggaagatgatgttgtcaagaagggcgctatttgtactcctaaatactccagtccttttccatgcactggaggagaggttattttcaaagctttgtcaccaccatacgatacagagaacccttacagtgccaaagttcaggagcagctgaagatcaccaaccttcgcgtgcagctgctgaaacgacagtcttatccctgtcagagaaatgacctgaacgaagagcctcaacattttacacactatgcgatctatgatttcattgtcaagggcagctgcttctgcaatggccacgccgatcaatgcatacctgttcatggcttcagacctgtcaaggccccaggaacattccacatggtccatgggaagtgtatgtgtaagcacaacacagcaggcagccactgccagcactgtgccccgttatacaatgaccggccatgggaggcagctgatggcaaaacgggggctcccaacgagtgcagaacccgcaagtgtaatgggcatgctgatacctgtcacttcgacgttaatgtgtgggaggcatcagggaatcgtagtggtggtgtctgtgatgactgtcagcacaacacagaaggacagtattgccagaggtgcaagccaggcttctatcgtgacctgcggagacccttctcagctccagatgcttgcaaaccgtgttcctgccatccagtaggatcagctgtccttcctgccaactcagtgaccttctgcgaccccagcaatggtgactgcccttgcaagcctggggtggcagggcgacgttgtgacaggtgcatggtgggatactggggcttcggagactatggctgtcgaccatgtgactgtgcggggagctgtgaccctatcaccggagactgcatcagcagccacacagacatagactggtgtcatgaagttcctgacttccgtcccgtgcacaataagagcgaaccagcctgggagtgggaggatgcgcaggggttttctgcacttctacactcaggtaaatgcgaatgtaaggaacagacattaggaaag

SEQ ID NO: 286 - protein, 496 aa, Homo sapiens
LSGVAGVSSRCEKACNPRMGNLALGRKLWADTTCGQNATELYCFYSENTDLTCRQPKCDKCNAAYPHLAHLPSAMADSSFRFPRTWWQSAEDVHREKIQLDLEAEFYFTHLIVMFKSPRPAAMVLDRSQDFGKTWKPYKYFATNCSATFGLEDDVVKKGAICTPKYSSPFPCTGGEVIFKALSPPYDTENPYSAKVQEQLKITNLRVQLLKRQSYPCQRNDLNEEPQHFTHYAIYDFIVKGSCFCNGHADQCIPVHGFRPVKAPGTFHMVHGKCMCKHNTAGSHCQHCAPLYNDRPWEAADGKTGAPNECRTRKCNGHADTCHFDVNVWEASGNRSGGVCDDCQHNTEGQYCQRCKPGFYRDLRRPFSAPDACKPCSCHPVGSAVLPANSVTFCDPSNGDCPCKPGVAGRRCDRCMVGYWGFGDYGCRPCDCAGSCDPITGDCISSHTDIDWCHEVPDFRPVHNKSEPAWEWEDAQGFSALLHSGKCECKEQTLGK

SEQ ID NO: 287 - DNA, 1488 bp, Homo sapiens
  CDS (1)..(1488)
ctgagtggagtagctggagtgagttcccgctgtgaaaaagcctgcaaccctcggatgggaaatttggctttggggcgaaaactctgggcagacaccacctgcggtcagaatgctaccgaactgtactgcttctacagtgagaacacggatctgacttgtcggcagcccaaatgtgacaagtgcaatgctgcctatcctcacctggctcacctgccatctgccatggcagactcatccttccggtttcctcgcacatggtggcagtctgcggaggatgtgcacagagaaaagatccagttagacctggaagctgaattctacttcactcacctaattgtgatgttcaagtcccccaggccggctgccatggtgctggaccgctcccaggactttgggaaaacatggaagccttataagtactttgcgactaactgctccgctacatttggcctggaagatgatgttgtcaagaagggcgctatttgtactcctaaatactccagtccttttccatgcactggaggagaggttattttcaaagctttgtcaccaccatacgatacagagaacccttacagtgccaaagttcaggagcagctgaagatcaccaaccttcgcgtgcagctgctgaaacgacagtcttatccctgtcagagaaatgacctgaacgaagagcctcaacattttacacactatgcgatctatgatttcattgtcaagggcagctgcttctgcaatggccacgccgatcaatgcatacctgttcatggcttcagacctgtcaaggccccaggaacattccacatggtccatgggaagtgtatgtgtaagcacaacacagcaggcagccactgccagcactgtgccccgttatacaatgaccggccatgggaggcagctgatggcaaaacgggggctcccaacgagtgcagagcctgcaagtgtaatgggcatgctgatacctgtcacttcgacgttaatgtgtgggaggcatcagggaatcgtagtggtggtgtctgtgatgactgtcagcacaacacagaaggacagtattgccagaggtgcaagccaggcttctatcgtgacctgcggagacccttctcagctccagatgcttgcaaaccgtgttcctgccatccagtaggatcagctgtccttcctgccaactcagtgaccttctgcgaccccagcaatggtgactgcccttgcaagcctggggtggcagggcgacgttgtgacaggtgcatggtgggatactggggcttcggagactatggctgtcgaccatgtgactgtgcggggagctgtgaccctatcaccggagactgcatcagcagccacacagacatagactggtatcatgaagttcctgacttccgtcccgtgcacaataagagcgaaccagcctgggagtgggaggatgcgcaggggttttctgcacttctacactcaggtaaatgcgaatgtaaggaacagacattaggaaag

SEQ ID NO: 288 - protein, 496 aa, Homo sapiens
LSGVAGVSSRCEKACNPRMGNLALGRKLWADTTCGQNATELYCFYSENTDLTCRQPKCDKCNAAYPHLAHLPSAMADSSFRFPRTWWQSAEDVHREKIQLDLEAEFYFTHLIVMFKSPRPAAMVLDRSQDFGKTWKPYKYFATNCSATFGLEDDVVKKGAICTPKYSSPFPCTGGEVIFKALSPPYDTENPYSAKVQEQLKITNLRVQLLKRQSYPCQRNDLNEEPQHFTHYAIYDFIVKGSCFCNGHADQCIPVHGFRPVKAPGTFHMVHGKCMCKHNTAGSHCQHCAPLYNDRPWEAADGKTGAPNECRACKCNGHADTCHFDVNVWEASGNRSGGVCDDCQHNTEGQYCQRCKPGFYRDLRRPFSAPDACKPCSCHPVGSAVLPANSVTFCDPSNGDCPCKPGVAGRRCDRCMVGYWGFGDYGCRPCDCAGSCDPITGDCISSHTDIDWYHEVPDFRPVHNKSEPAWEWEDAQGFSALLHSGKCECKEQTLGK

SEQ ID NO: 289 - DNA, 1488 bp, Homo sapiens
  CDS (1)..(1488)
ctgagtggagtagctggagtgagttcccgctgtgaaaaagcctgcaaccctcggatgggaaatttggctttggggcgaaaactctgggcagacaccacctgcggtcagaatgctaccgaactgtactgcttctacagtgagaacacggatctgacttgtcggcagcccaaatgtgacaagtgcaatgctgcctatcctcacctggctcacctgccatctgccatggcagactcatccttccggtttcctcgcacatggtggcagtctgcggaggatgtgcacagagaaaagatccagttagacctggaagctgaattctacttcactcacctaattgtgatgttcaagtcccccaggccggctgccatggtgctggaccgctcccaggactttgggaaaacatggaagccttataagtactttgcgactaactgctccgctacatttggcctggaagatgatgttgtcaagaagggcgctatttgtactcctaaatactccagtccttttccatgcactggaggagaggttattttcaaagctttgtcaccaccatacgatacagagaacccttacagtgccaaagttcaggagcagctgaagatcaccaaccttcgcgtgcagctgctgaaacgacagtcttatccctgtcagagaaatgacctgaacgaagagcctcaacattttacacactatgcgatctatgatttcattgtcaagggcagctgcttctgcaatggccacgccgatcaatgcatacctgttcatggcttcagacctgtcaaggccccaggaacattccacatggtccatgggaagtgtatgtgtaagcacaacacagcaggcagccactgccagcactgtgccccgttatacaatgaccggccatgggaggcagctgatggcaaaacgggggctcccaacgagtgcagagcctgcaagtgtaatgggcatgctgatacctgtcacttcgacgttaatgtgtgggaggcatcagggagtcgtagtggtggtgtctgtgatgactgtcagcacaacacagaaggacagtattgccagaggtgcaagccaggcttctatcgtgacctgcggagacccttctcagctccagatgcttgcaaaccgtgttcctgccatccagtaggatcagctgtccttcctgccaactcagtgaccttctgcgaccccagcaatggtgactgcccttgcaagcctggggtggcagggcgacgttgtgacaggtgcatggtgggatactggggcttcggagactatggctgtcgaccatgtgactgtgcggggagctgtgaccctatcaccggagactgcatcagcagccacacagacatagactggtgtcatgaagttcctgacttccgtcccgtgcacaataagagcgaaccagcctgggagtgggaggatgcgcaggggttttctgcacttctacactcaggtaaatgcgaatgtaaggaacagacattaggaaag

SEQ ID NO: 290 - protein, 496 aa, Homo sapiens
LSGVAGVSSRCEKACNPRMGNLALGRKLWADTTCGQNATELYCFYSENTDLTCRQPKCDKCNAAYPHLAHLPSAMADSSFRFPRTWWQSAEDVHREKIQLDLEAEFYFTHLIVMFKSPRPAAMVLDRSQDFGKTWKPYKYFATNCSATFGLEDDVVKKGAICTPKYSSPFPCTGGEVIFKALSPPYDTENPYSAKVQEQLKITNLRVQLLKRQSYPCQRNDLNEEPQHFTHYAIYDFIVKGSCFCNGHADQCIPVHGFRPVKAPGTFHMVHGKCMCKHNTAGSHCQHCAPLYNDRPWEAADGKTGAPNECRACKCNGHADTCHFDVNVWEASGSRSGGVCDDCQHNTEGQYCQRCKPGFYRDLRRPFSAPDACKPCSCHPVGSAVLPANSVTFCDPSNGDCPCKPGVAGRRCDRCMVGYWGFGDYGCRPCDCAGSCDPITGDCISSHTDIDWCHEVPDFRPVHNKSEPAWEWEDAQGFSALLHSGKCECKEQTLGK

SEQ ID NO: 291 - DNA, 1488 bp, Homo sapiens
  CDS (1)..(1488)
ctgagtggagtagctggagtgagttcccgctgtgaaaaagcctgcaaccctcggatgggaaatttggctttggggcgaaaactctgggcagacaccacctgcggtcagaatgctaccgaactgtactgcttctacagtgagaacacggatctgacttgtcggcagcccaaatgtgacaagtgcaatgctgcctatcctcacctggctcacctgccatctgccatggcagactcatccttccggtttcctcgcacatggtggcagtctgcggaggatgtgcacagagaaaagatccagttagacctggaagctgaattctacttcactcacctaattgtgatgttcaagtcccccaggccggctgccatggtgctggaccgctcccaggactttgggaaaacatggaagccttataagtactttgcgactaactgctccgctacatttggcctggaagatgatgttgtcaagaagggcgctatttgtactcctaaatactccagtccttttccatgcactggaggagaggttattttcaaagctttgtcaccaccatacgatacagagaacccttacagtgccaaagttcaggagcagctgaagatcaccaaccttcgcgtgcagctgctgaaacgacagtcttatccctgtcagagaaatgacctgaacgaagagcctcaacattttacacactatgcgatctatgatttcattgtcaagggcagctgcttctgcaatggccacgccgatcaatgcatacctgttcatggcttcagacctgtcaaggccccaggaacattccacatggtccatgggaagtgtatgtgtaagcacaacacagcaggcagccactgccagcactgtgccccgttatacaatgaccggccatgggaggcagctgatggcaaaacgggggctcccaacgagtgcagagcccgcaagtgtaatgggcatgctgatacctgtcacttcgacgttaatgtgtgggaggcatcagggaatcgtagtggtggtgtctgtgatgactgtcagcacaacacagaaggacagtattgccagaggtgcaagccaggcttctatcgtgacctgcggagacccttctcagctccagatgcttgcaaaccgtgttcctgccatccagtaggatcagctgtccttcctgccaactcagtgaccttctgcgaccccagcaatggtgactgcccttgcaagcctggggtggcagggcgacgttgtgacaggtgcatggtgggatactggggcttcggagactatggctgtcgaccatgtgactgtgcggggagctgtgaccctatcaccggagactgcatcagcagccacacagacatagactggtgtcatgaagttcctgacttccgtcccgtgcacaataagagcgaaccagcctgggagtgggaggatgcgcaggggttttctgcacttctacactcaggtaaatgcgaatgtaaggaacagacattaggaaag

SEQ ID NO: 292 - protein, 496 aa, Homo sapiens
LSGVAGVSSRCEKACNPRMGNLALGRKLWADTTCGQNATELYCFYSENTDLTCRQPKCDKCNAAYPHLAHLPSAMADSSFRFPRTWWQSAEDVHREKIQLDLEAEFYFTHLIVMFKSPRPAAMVLDRSQDFGKTWKPYKYFATNCSATFGLEDDVVKKGAICTPKYSSPFPCTGGEVIFKALSPPYDTENPYSAKVQEQLKITNLRVQLLKRQSYPCQRNDLNEEPQHFTHYAIYDFIVKGSCFCNGHADQCIPVHGFRPVKAPGTFHMVHGKCMCKHNTAGSHCQHCAPLYNDRPWEAADGKTGAPNECRARKCNGHADTCHFDVNVWEASGNRSGGVCDDCQHNTEGQYCQRCKPGFYRDLRRPFSAPDACKPCSCHPVGSAVLPANSVTFCDPSNGDCPCKPGVAGRRCDRCMVGYWGFGDYGCRPCDCAGSCDPITGDCISSHTDIDWCHEVPDFRPVHNKSEPAWEWEDAQGFSALLHSGKCECKEQTLGK

SEQ ID NO: 293 - DNA, 1488 bp, Homo sapiens
  CDS (1)..(1488)
ctgagtggagtagctggagtgagttcccgctgtgaaaaagcctgcaaccctcggatgggaaatttggctttggggcgaaaactctgggcagacaccacctgcggtcagaatgctaccgaactgtactgcttctacagtgagaacacggatctgacttgtcggcagcccaaatgtgacaagtgcaatgctgcctatcctcacctggctcacctgccatctgccatggcagactcatccttccggtttcctcgcacatggtggcagtctgcggaggatgtgcacagagaaaagatccagttagacctggaagctgaattctacttcactcacctaattgtgatgttcaagtcccccaggccggctgccatggtgctggaccgctcccaggactttgggaaaacatggaagccttataagtactttgcgactaactgctccgctacatttggcctggaagatgatgttgtcaagaagggcgctatttgtactcctaaatactccagtccttttccatgcactggaggagaggttattttcaaagctttgtcaccaccatacgatacagagaacccttacagtgccaaagttcaggagcagctgaagatcaccaaccttcgcgtgcagctgctgaaacgacagtcttatccctgtcagagaaatgacctgaacgaagagcctcaacattttacacactatgcgatctatgatttcattgtcaagggcagctgcttctgcaatggccacgccgatcaatgcatacctgttcatggcttcagacctgtcaaggccccaggaacattccacatggtccatgggaagtgtatgtgtaagcacaacacagcaggcagccactgccagcactgtgccccgttatacaatgaccggccatgggaggcagctgatggcaaaacgggggctcccaacgagtgcagaacctgcaagtgtaatgggcatgctgatacctgtcacttcgacgttaatgtgtgggaggcatcagggaatcgtagtggtggtgtctgtgatgactgtcagcacaacacagaaggacagtattgccagaggtgcaagccaggcttctatcgtgacctgcggagacccttctcagctccagatgcttgcaaaccgtgttcctgccatccagtaggatcagctgtccttcctgccaactcagtgaccttctgcgaccccagcaatggtgactgcccttgcaagcctggggtggcagggcgacgttgtgacaggtgcatggtgggatactggggcttcggagactatggctgtcgaccatgtgactgtgcggggagctgtgaccctatcaccggagactgcatcagcagccacacagacatagactggtgtcatgaagttcctgacttccgtcccgtgcacaataagagcgaaccagcctgggagtgggaggatgcgcaggggttttctgcacttctacactcaggtaaatgcgaatgtaaggaacagacattaggaaag

SEQ ID NO: 294 - protein, 496 aa, Homo sapiens
LSGVAGVSSRCEKACNPRMGNLALGRKLWADTTCGQNATELYCFYSENTDLTCRQPKCDKCNAAYPHLAHLPSAMADSSFRFPRTWWQSAEDVHREKIQLDLEAEFYFTHLIVMFKSPRPAAMVLDRSQDFGKTWKPYKYFATNCSATFGLEDDVVKKGAICTPKYSSPFPCTGGEVIFKALSPPYDTENPYSAKVQEQLKITNLRVQLLKRQSYPCQRNDLNEEPQHFTHYAIYDFIVKGSCFCNGHADQCIPVHGFRPVKAPGTFHMVHGKCMCKHNTAGSHCQHCAPLYNDRPWEAADGKTGAPNECRTCKCNGHADTCHFDVNVWEASGNRSGGVCDDCQHNTEGQYCQRCKPGFYRDLRRPFSAPDACKPCSCHPVGSAVLPANSVTFCDPSNGDCPCKPGVAGRRCDRCMVGYWGFGDYGCRPCDCAGSCDPITGDCISSHTDIDWCHEVPDFRPVHNKSEPAWEWEDAQGFSALLHSGKCECKEQTLGK

SEQ ID NO: 295 - DNA, 1488 bp, Homo sapiens
  CDS (1)..(1488)
ctgagtggagtagctggagtgagttcccgctgtgaaaaagcctgcaaccctcggatgggaaatttggctttggggcgaaaactctgggcagacaccacctgcggtcagaatgctaccgaactgtactgcttctacagtgagaacacggatctgacttgtcggcagcccaaatgtgacaagtgcaatgctgcctatcctcacctggctcacctgccatctgccatggcagactcatccttccggtttcctcgcacatggtggcagtctgcggaggatgtgcacagagaaaagatccagttagacctggaagctgaattctacttcactcacctaattgtgatgttcaagtcccccaggccggctgccatggtgctggaccgctcccaggactttgggaaaacatggaagccttataagtactttgcgactaactgctccgctacatttggcctggaagatgatgttgtcaagaagggcgctatttgtactcctaaatactccagtccttttccatgcactggaggagaggttattttcaaagctttgtcaccaccatacgatacagagaacccttacagtgccaaagttcaggagcagctgaagatcaccaaccttcgcgtgcagctgctgaaacgacagtcttatccctgtcagagaaatgacctgaacgaagagcctcaacattttacacactatgcgatctatgatttcattgtcaagggcagctgcttctgcaatggccacgccgatcaatgcatacctgttcatggcttcagacctgtcaaggccccaggaacattccacatggtccatgggaagtgtatgtgtaagcacaacacagcaggcagccactgccagcactgtgccccgttatacaatgaccggccatgggaggcagctgatggcaaaacgggggctcccaacgagtgcagagcctgcaagtgtaatgggcatgctgatacctgtcacttcgacgttaatgtgtgggaggcatcagggaatcgtagtggtggtgtctgtgatgactgtcagcacaacacagaaggacagtattgccagaggtgcaagccaggcttctatcgtgacctgcggagacccttctcagctccagatgcttgcaaaccgtgttcctgccatccagtaggatcagctgtccttcctgccaactcagtgaccttctgcgaccccagcaatggtgactgcccttgcaagcctggggtggcagggcgacgttgtgacaggtgcatggtgggatactggggcttcggagactatggctgtcgaccatgtgactgtgcggggagctgtgaccctatcaccggagactgcatcagcagccacacagacatagactggtgtcatgaagttcctgacttccgtcccgtgcacaataagagcgaaccagcctgggagtgggaggatgcgcaggggttttctgcacttctacactcaggtaaatgcgaatgtaaggaacagacattaggaaag

SEQ ID NO: 296 - protein, 496 aa, Homo sapiens
LSGVAGVSSRCEKACNPRMGNLALGRKLWADTTCGQNATELYCFYSENTDLTCRQPKCDKCNAAYPHLAHLPSAMADSSFRFPRTWWQSAEDVHREKIQLDLEAEFYFTHLIVMFKSPRPAAMVLDRSQDFGKTWKPYKYFATNCSATFGLEDDVVKKGAICTPKYSSPFPCTGGEVIFKALSPPYDTENPYSAKVQEQLKITNLRVQLLKRQSYPCQRNDLNEEPQHFTHYAIYDFIVKGSCFCNGHADQCIPVHGFRPVKAPGTFHMVHGKCMCKHNTAGSHCQHCAPLYNDRPWEAADGKTGAPNECRACKCNGHADTCHFDVNVWEASGNRSGGVCDDCQHNTEGQYCQRCKPGFYRDLRRPFSAPDACKPCSCHPVGSAVLPANSVTFCDPSNGDCPCKPGVAGRRCDRCMVGYWGFGDYGCRPCDCAGSCDPITGDCISSHTDIDWCHEVPDFRPVHNKSEPAWEWEDAQGFSALLHSGKCECKEQTLGK

SEQ ID NO: 297 - DNA, 1488 bp, Homo sapiens
  CDS (1)..(1488)
ctgagtggagtagctggagtgagttcccgctgtgaaaaagcctgcaaccctcggatgggaaatttggctttggggcgaaaactctgggcagacaccacctgcggtcagaatgctaccgaactgtactgcttctacagtgagaacaaggatctgacttgtcggcagcccaaatgtgacaagtgcaatgctgcctatcctcacctggctcacctgccatctgccatggcagactcatccttccggtttcctcgcacatggtggcagtctgcggaggatgtgcacagagaaaagatccagttagacctggaagctgaattctacttcactcacctaattgtgatgttcaagtcccccaggccggctgccatggtgctggaccgctcccaggactttgggaaaacatggaagccttataagtactttgcgactaactgctccgctacatttggcctggaagatgatgttgtcaagaagggcgctatttgtacttctaaatactccagtccttttccatgcactggaggagaggttattttcaaagctttgtcaccaccacacgatacagagaacccttacagtgccaaagttcaggagcagctgaagatcaccaaccttcgcgtgcagctgctgaaacgacagtcttgtccctgtcagagaaatgacctgaacgaagagcctcaacattttacacactatgcgatctatgatttcattgtcaagggcagctgcttctgcaatggccacgccgatcaatgcatacctgttcatggcttcagacctgtcaaggccccaggaacattccacatggtccatgggaagtgtatgtgtaagcacaacacagcaggcagccactgccagcactgtgccccgttatacaatgaccggccatgggaggcagctgatggcaaaacgggggctcccaacgagtgcagaacctgcaagtgtaatgggcatgctgatacctgtcacttcgacgttaatgtgtgggaggcatcagggaatcgtagtggtggtgtctgtgatgactgtcagcacaacacagaaggacagtattgccagaggtgcaagccaggcttctatcgtgacctgcggagacccttctcagctccagatgcttgcaaaccgtgttcctgccatccagtaggatcagctgtccttcctgccaactcagtgaccttctgcgaccccagcaatggtgactgcccttgcaagcctggggtggcagggcgacgttgtgacaggtgcatggtgggatactggggcttcggagactatggctgtcgaccatgtgactgtgcggggagctgtgaccctatcaccggagactgcatcagcagccacacagacatagactggtgtcatgaagttcctgacttccgtcccgtgcacaataagagcgaaccagcctgggagtgggaggatgcgcaggggttttctgcacttctacactcaggtaaatgcgaatgtaaggaacagacattaggaaat

SEQ ID NO: 298 - protein, 496 aa, Homo sapiens
LSGVAGVSSRCEKACNPRMGNLALGRKLWADTTCGQNATELYCFYSENKDLTCRQPKCDKCNAAYPHLAHLPSAMADSSFRFPRTWWQSAEDVHREKIQLDLEAEFYFTHLIVMFKSPRPAAMVLDRSQDFGKTWKPYKYFATNCSATFGLEDDVVKKGAICTSKYSSPFPCTGGEVIFKALSPPHDTENPYSAKVQEQLKITNLRVQLLKRQSCPCQRNDLNEEPQHFTHYAIYDFIVKGSCFCNGHADQCIPVHGFRPVKAPGTFHMVHGKCMCKHNTAGSHCQHCAPLYNDRPWEAADGKTGAPNECRTCKCNGHADTCHFDVNVWEASGNRSGGVCDDCQHNTEGQYCQRCKPGFYRDLRRPFSAPDACKPCSCHPVGSAVLPANSVTFCDPSNGDCPCKPGVAGRRCDRCMVGYWGFGDYGCRPCDCAGSCDPITGDCISSHTDIDWCHEVPDFRPVHNKSEPAWEWEDAQGFSALLHSGKCECKEQTLGN

SEQ ID NO: 299 - DNA, 1488 bp, Homo sapiens
  CDS (1)..(1488)
ctgagtggagtagctggagtgagttcccgctgtgaaaaagcctgcaaccctcggatgggaaatttggctttggggcgaaaactctgggcagacaccacctgcggtcagaatgctaccgaactgtactgcttctacagtgagaacaaggatctgacttgtcggcagcccaaatgtgacaagtgcaatgctgcctatcctcacctggctcacctgccatctgccatggcagactcatccttccggtttcctcgcacatggtggcagtctgcggaggatgtgcacagagaaaagatccagttagacctggaagctgaattctacttcactcacctaattgtgatgttcaagtcccccaggccggctgccatggtgctggaccgctcccaggactttgggaaaacatggaagccttataagtactttgcgactaactgctccgctacatttggcctggaagatgatgttgtcaagaagggcgctatttgtacttctaaatactccagtccttttccatgcactggaggagaggttattttcaaagctttgtcaccaccacacgatacagagaacccttacagtgccaaagttcaggagcagctgaagatcaccaaccttcgcgtgcagctgctgaaacgacagtcttgtccctgtcagagaaatgacctgaacgaagagcctcaacattttacacactatgcgatctatgatttcattgtcaagggcagctgcttctgcaatggccacgccgatcaatgcatacctgttcatggcttcagacctgtcaaggccccaggaacattccacatggtccatgggaagtgtatgtgtaagcacaacacagcaggcagccactgccagcactgtgccccgttatacaatgaccggccatgggaggcagctgatggcaaaacgggggctcccaacgagtgcagagcccgcaagtgtaatgggcatgctgatacctgtcacttcgacgttaatgtgtgggaggcatcagggaatcgtagtggtggtgtctgtgatgactgtcagcacaacacagaaggacagtattgccagaggtgcaagccaggcttctatcgtgacctgcggagacccttctcagctccagatgcttgcaaaccgtgttcctgccatccagtaggatcagctgtccttcctgccaactcagtgaccttctgcgaccccagcaatggtgactgcccttgcaagcctggggtggcagggcgacgttgtgacaggtgcatggtgggatactggggcttcggagactatggctgtcgaccatgtgactgtgcggggagctgtgaccctatcaccggagactgcatcagcagccacacagacatagactggtgtcatgaagttcctgacttccgtcccgtgcacaataagagcgaaccagcctgggagtgggaggatgcgcaggggttttctgcacttctacactcaggtaaatgcgaatgtaaggaacagacattaggaaat

SEQ ID NO: 300 - protein, 496 aa, Homo sapiens
LSGVAGVSSRCEKACNPRMGNLALGRKLWADTTCGQNATELYCFYSENKDLTCRQPKCDKCNAAYPHLAHLPSAMADSSFRFPRTWWQSAEDVHREKIQLDLEAEFYFTHLIVMFKSPRPAAMVLDRSQDFGKTWKPYKYFATNCSATFGLEDDVVKKGAICTSKYSSPFPCTGGEVIFKALSPPHDTENPYSAKVQEQLKITNLRVQLLKRQSCPCQRNDLNEEPQHFTHYAIYDFIVKGSCFCNGHADQCIPVHGFRPVKAPGTFHMVHGKCMCKHNTAGSHCQHCAPLYNDRPWEAADGKTGAPNECRARKCNGHADTCHFDVNVWEASGNRSGGVCDDCQHNTEGQYCQRCKPGFYRDLRRPFSAPDACKPCSCHPVGSAVLPANSVTFCDPSNGDCPCKPGVAGRRCDRCMVGYWGFGDYGCRPCDCAGSCDPITGDCISSHTDIDWCHEVPDFRPVHNKSEPAWEWEDAQGFSALLHSGKCECKEQTLGN

SEQ ID NO: 301 - DNA, 1488 bp, Homo sapiens
  CDS (1)..(1488)
ctgagtggagtagctggagtgagttcccgctgtgaaaaagcctgcaaccctcggatgggaaatttggctttggggcgaaaactctgggcagacaccacctgcggtcagaatgctaccgaactgtactgcttctacagtgagaacaaggatctgacttgtcggcagcccaaatgtgacaagtgcaatgctgcctatcctcacctggctcacctgccatctgccatggcagactcatccttccggtttcctcgcacatggtggcagtctgcggaggatgtgcacagagaaaagatccagttagacctggaagctgaattctacttcactcacctaattgtgatgttcaagtcccccaggccggctgccatggtgctggaccgctcccaggactttgggaaaacatggaagccttataagtactttgcgactaactgctccgctacatttggcctggaagatgatgttgtcaagaagggcgctatttgtacttctaaatactccagtccttttccatgcactggaggagaggttattttcaaagctttgtcaccaccacacgatacagagaacccttacagtgccaaagttcaggagcagctgaagatcaccaaccttcgcgtgcagctgctgaaacgacagtcttgtccctgtcagagaaatgacctgaacgaagagcctcaacattttacacactatgcgatctatgatttcattgtcaagggcagctgcttctgcaatggccacgccgatcaatgcatacctgttcatggcttcagacctgtcaaggccccaggaacattccacatggtccatgggaagtgtatgtgtaagcacaacacagcaggcagccactgccagcactgtgccccgttatacaatgaccggccatgggaggcagctgatggcaaaacgggggctcccaacgagtgcagagcctgcaagtgtaatgggcatgctgatacctgtcacttcgacgttaatgtgtgggaggcatcagggagtcgtagtggtggtgtctgtgatgactgtcagcacaacacagaaggacagtattgccagaggtgcaagccaggcttctatcgtgacctgcggagacccttctcagctccagatgcttgcaaaccgtgttcctgccatccagtaggatcagctgtccttcctgccaactcagtgaccttctgcgaccccagcaatggtgactgcccttgcaagcctggggtggcagggcgacgttgtgacaggtgcatggtgggatactggggcttcggagactatggctgtcgaccatgtgactgtgcggggagctgtgaccctatcaccggagactgcatcagcagccacacagacatagactggtgtcatgaagttcctgacttccgtcccgtgcacaataagagcgaaccagcctgggagtgggaggatgcgcaggggttttctgcacttctacactcaggtaaatgcgaatgtaaggaacagacattaggaaat

SEQ ID NO: 302 - protein, 496 aa, Homo sapiens
LSGVAGVSSRCEKACNPRMGNLALGRKLWADTTCGQNATELYCFYSENKDLTCRQPKCDKCNAAYPHLAHLPSAMADSSFRFPRTWWQSAEDVHREKIQLDLEAEFYFTHLIVMFKSPRPAAMVLDRSQDFGKTWKPYKYFATNCSATFGLEDDVVKKGAICTSKYSSPFPCTGGEVIFKALSPPHDTENPYSAKVQEQLKITNLRVQLLKRQSCPCQRNDLNEEPQHFTHYAIYDFIVKGSCFCNGHADQCIPVHGFRPVKAPGTFHMVHGKCMCKHNTAGSHCQHCAPLYNDRPWEAADGKTGAPNECRACKCNGHADTCHFDVNVWEASGSRSGGVCDDCQHNTEGQYCQRCKPGFYRDLRRPFSAPDACKPCSCHPVGSAVLPANSVTFCDPSNGDCPCKPGVAGRRCDRCMVGYWGFGDYGCRPCDCAGSCDPITGDCISSHTDIDWCHEVPDFRPVHNKSEPAWEWEDAQGFSALLHSGKCECKEQTLGN

SEQ ID NO: 303 - DNA, 1488 bp, Homo sapiens
  CDS (1)..(1488)
ctgagtggagtagctggagtgagttcccgctgtgaaaaagcctgcaaccctcggatgggaaatttggctttggggcgaaaactctgggcagacaccacctgcggtcagaatgctaccgaactgtactgcttctacagtgagaacaaggatctgacttgtcggcagcccaaatgtgacaagtgcaatgctgcctatcctcacctggctcacctgccatctgccatggcagactcatccttccggtttcctcgcacatggtggcagtctgcggaggatgtgcacagagaaaagatccagttagacctggaagctgaattctacttcactcacctaattgtgatgttcaagtcccccaggccggctgccatggtgctggaccgctcccaggactttgggaaaacatggaagccttataagtactttgcgactaactgctccgctacatttggcctggaagatgatgttgtcaagaagggcgctatttgtacttctaaatactccagtccttttccatgcactggaggagaggttattttcaaagctttgtcaccaccacacgatacagagaacccttacagtgccaaagttcaggagcagctgaagatcaccaaccttcgcgtgcagctgctgaaacgacagtcttgtccctgtcagagaaatgacctgaacgaagagcctcaacattttacacactatgcgatctatgatttcattgtcaagggcagctgcttctgcaatggccacgccgatcaatgcatacctgttcatggcttcagacctgtcaaggccccaggaacattccacatggtccatgggaagtgtatgtgtaagcacaacacagcaggcagccactgccagcactgtgccccgttatacaatgaccggccatgggaggcagctgatggcaaaacgggggctcccaacgagtgcagagcctgcaagtgtaatgggcatgctgatacctgtcacttcgacgttaatgtgtgggaggcatcagggaatcgtagtggtggtgtctgtgatgactgtcagcacaacacagaaggacagtattgccagaggtgcaagccaggcttctatcgtgacctgcggagacccttctcagctccagatgcttgcaaaccgtgttcctgccatccagtaggatcagctgtccttcctgccaactcagtgaccttctgcgaccccagcaatggtgactgcccttgcaagcctggggtggcagggcgacgttgtgacaggtgcatggtgggatactggggcttcggagactatggctgtcgaccatgtgactgtgcggggagctgtgaccctatcaccggagactgcatcagcagccacacagacatagactggtatcatgaagttcctgacttccgtcccgtgcacaataagagcgaaccagcctgggagtgggaggatgcgcaggggttttctgcacttctacactcaggtaaatgcgaatgtaaggaacagacattaggaaat

SEQ ID NO: 304 - protein, 496 aa, Homo sapiens
LSGVAGVSSRCEKACNPRMGNLALGRKLWADTTCGQNATELYCFYSENKDLTCRQPKCDKCNAAYPHLAHLPSAMADSSFRFPRTWWQSAEDVHREKIQLDLEAEFYFTHLIVMFKSPRPAAMVLDRSQDFGKTWKPYKYFATNCSATFGLEDDVVKKGAICTSKYSSPFPCTGGEVIFKALSPPHDTENPYSAKVQEQLKITNLRVQLLKRQSCPCQRNDLNEEPQHFTHYAIYDFIVKGSCFCNGHADQCIPVHGFRPVKAPGTFHMVHGKCMCKHNTAGSHCQHCAPLYNDRPWEAADGKTGAPNECRACKCNGHADTCHFDVNVWEASGNRSGGVCDDCQHNTEGQYCQRCKPGFYRDLRRPFSAPDACKPCSCHPVGSAVLPANSVTFCDPSNGDCPCKPGVAGRRCDRCMVGYWGFGDYGCRPCDCAGSCDPITGDCISSHTDIDWYHEVPDFRPVHNKSEPAWEWEDAQGFSALLHSGKCECKEQTLGN

SEQ ID NO: 305 - DNA, 1488 bp, Homo sapiens
  CDS (1)..(1488)
ctgagtggagtagctggagtgagttcccgctgtgaaaaagcctgcaaccctcggatgggaaatttggctttggggcgaaaactctgggcagacaccacctgcggtcagaatgctaccgaactgtactgcttctacagtgagaacaaggatctgacttgtcggcagcccaaatgtgacaagtgcaatgctgcctatcctcacctggctcacctgccatctgccatggcagactcatccttccggtttcctcgcacatggtggcagtctgcggaggatgtgcacagagaaaagatccagttagacctggaagctgaattctacttcactcacctaattgtgatgttcaagtcccccaggccggctgccatggtgctggaccgctcccaggactttgggaaaacatggaagccttataagtactttgcgactaactgctccgctacatttggcctggaagatgatgttgtcaagaagggcgctatttgtacttctaaatactccagtccttttccatgcactggaggagaggttattttcaaagctttgtcaccaccacacgatacagagaacccttacagtgccaaagttcaggagcagctgaagatcaccaaccttcgcgtgcagctgctgaaacgacagtcttgtccctgtcagagaaatgacctgaacgaagagcctcaacattttacacactatgcgatctatgatttcattgtcaagggcagctgcttctgcaatggccacgccgatcaatgcatacctgttcatggcttcagacctgtcaaggccccaggaacattccacatggtccatgggaagtgtatgtgtaagcacaacacagcaggcagccactgccagcactgtgccccgttatacaatgaccggccatgggaggcagctgatggcaaaacgggggctcccaacgagtgcagaacccgcaagtgtaatgggcatgctgatacctgtcacttcgacgttaatgtgtgggaggcatcagggaatcgtagtggtggtgtctgtgatgactgtcagcacaacacagaaggacagtattgccagaggtgcaagccaggcttctatcgtgacctgcggagacccttctcagctccagatgcttgcaaaccgtgttcctgccatccagtaggatcagctgtccttcctgccaactcagtgaccttctgcgaccccagcaatggtgactgcccttgcaagcctggggtggcagggcgacgttgtgacaggtgcatggtgggatactggggcttcggagactatggctgtcgaccatgtgactgtgcggggagctgtgaccctatcaccggagactgcatcagcagccacacagacatagactggtgtcatgaagttcctgacttccgtcccgtgcacaataagagcgaaccagcctgggagtgggaggatgcgcaggggttttctgcacttctacactcaggtaaatgcgaatgtaaggaacagacattaggaaat

SEQ ID NO: 306 - protein, 496 aa, Homo sapiens
LSGVAGVSSRCEKACNPRMGNLALGRKLWADTTCGQNATELYCFYSENKDLTCRQPKCDKCNAAYPHLAHLPSAMADSSFRFPRTWWQSAEDVHREKIQLDLEAEFYFTHLIVMFKSPRPAAMVLDRSQDFGKTWKPYKYFATNCSATFGLEDDVVKKGAICTSKYSSPFPCTGGEVIFKALSPPHDTENPYSAKVQEQLKITNLRVQLLKRQSCPCQRNDLNEEPQHFTHYAIYDFIVKGSCFCNGHADQCIPVHGFRPVKAPGTFHMVHGKCMCKHNTAGSHCQHCAPLYNDRPWEAADGKTGAPNECRTRKCNGHADTCHFDVNVWEASGNRSGGVCDDCQHNTEGQYCQRCKPGFYRDLRRPFSAPDACKPCSCHPVGSAVLPANSVTFCDPSNGDCPCKPGVAGRRCDRCMVGYWGFGDYGCRPCDCAGSCDPITGDCISSHTDIDWCHEVPDFRPVHNKSEPAWEWEDAQGFSALLHSGKCECKEQTLGN

SEQ ID NO: 307 - DNA, 1488 bp, Homo sapiens
  CDS (1)..(1488)
ctgagtggagtagctggagtgagttcccgctgtgaaaaagcctgcaaccctcggatgggaaatttggctttggggcgaaaactctgggcagacaccacctgcggtcagaatgctaccgaactgtactgcttctacagtgagaacaaggatctgacttgtcggcagcccaaatgtgacaagtgcaatgctgcctatcctcacctggctcacctgccatctgccatggcagactcatccttccggtttcctcgcacatggtggcagtctgcggaggatgtgcacagagaaaagatccagttagacctggaagctgaattctacttcactcacctaattgtgatgttcaagtcccccaggccggctgccatggtgctggaccgctcccaggactttgggaaaacatggaagccttataagtactttgcgactaactgctccgctacatttggcctggaagatgatgttgtcaagaagggcgctatttgtacttctaaatactccagtccttttccatgcactggaggagaggttattttcaaagctttgtcaccaccacacgatacagagaacccttacagtgccaaagttcaggagcagctgaagatcaccaaccttcgcgtgcagctgctgaaacgacagtcttgtccctgtcagagaaatgacctgaacgaagagcctcaacattttacacactatgcgatctatgatttcattgtcaagggcagctgcttctgcaatggccacgccgatcaatgcatacctgttcatggcttcagacctgtcaaggccccaggaacattccacatggtccatgggaagtgtatgtgtaagcacaacacagcaggcagccactgccagcactgtgccccgttatacaatgaccggccatgggaggcagctgatggcaaaacgggggctcccaacgagtgcagaacctgcaagtgtaatgggcatgctgatacctgtcacttcgacgttaatgtgtgggaggcatcagggagtcgtagtggtggtgtctgtgatgactgtcagcacaacacagaaggacagtattgccagaggtgcaagccaggcttctatcgtgacctgcggagacccttctcagctccagatgcttgcaaaccgtgttcctgccatccagtaggatcagctgtccttcctgccaactcagtgaccttctgcgaccccagcaatggtgactgcccttgcaagcctggggtggcagggcgacgttgtgacaggtgcatggtgggatactggggcttcggagactatggctgtcgaccatgtgactgtgcggggagctgtgaccctatcaccggagactgcatcagcagccacacagacatagactggtgtcatgaagttcctgacttccgtcccgtgcacaataagagcgaaccagcctgggagtgggaggatgcgcaggggttttctgcacttctacactcaggtaaatgcgaatgtaaggaacagacattaggaaat

SEQ ID NO: 308 - protein, 496 aa, Homo sapiens
LSGVAGVSSRCEKACNPRMGNLALGRKLWADTTCGQNATELYCFYSENKDLTCRQPKCDKCNAAYPHLAHLPSAMADSSFRFPRTWWQSAEDVHREKIQLDLEAEFYFTHLIVMFKSPRPAAMVLDRSQDFGKTWKPYKYFATNCSATFGLEDDVVKKGAICTSKYSSPFPCTGGEVIFKALSPPHDTENPYSAKVQEQLKITNLRVQLLKRQSCPCQRNDLNEEPQHFTHYAIYDFIVKGSCFCNGHADQCIPVHGFRPVKAPGTFHMVHGKCMCKHNTAGSHCQHCAPLYNDRPWEAADGKTGAPNECRTCKCNGHADTCHFDVNVWEASGSRSGGVCDDCQHNTEGQYCQRCKPGFYRDLRRPFSAPDACKPCSCHPVGSAVLPANSVTFCDPSNGDCPCKPGVAGRRCDRCMVGYWGFGDYGCRPCDCAGSCDPITGDCISSHTDIDWCHEVPDFRPVHNKSEPAWEWEDAQGFSALLHSGKCECKEQTLGN

SEQ ID NO: 309 - DNA, 1488 bp, Homo sapiens
  CDS (1)..(1488)
ctgagtggagtagctggagtgagttcccgctgtgaaaaagcctgcaaccctcggatgggaaatttggctttggggcgaaaactctgggcagacaccacctgcggtcagaatgctaccgaactgtactgcttctacagtgagaacaaggatctgacttgtcggcagcccaaatgtgacaagtgcaatgctgcctatcctcacctggctcacctgccatctgccatggcagactcatccttccggtttcctcgcacatggtggcagtctgcggaggatgtgcacagagaaaagatccagttagacctggaagctgaattctacttcactcacctaattgtgatgttcaagtcccccaggccggctgccatggtgctggaccgctcccaggactttgggaaaacatggaagccttataagtactttgcgactaactgctccgctacatttggcctggaagatgatgttgtcaagaagggcgctatttgtacttctaaatactccagtccttttccatgcactggaggagaggttattttcaaagctttgtcaccaccacacgatacagagaacccttacagtgccaaagttcaggagcagctgaagatcaccaaccttcgcgtgcagctgctgaaacgacagtcttgtccctgtcagagaaatgacctgaacgaagagcctcaacattttacacactatgcgatctatgatttcattgtcaagggcagctgcttctgcaatggccacgccgatcaatgcatacctgttcatggcttcagacctgtcaaggccccaggaacattccacatggtccatgggaagtgtatgtgtaagcacaacacagcaggcagccactgccagcactgtgccccgttatacaatgaccggccatgggaggcagctgatggcaaaacgggggctcccaacgagtgcagaacctgcaagtgtaatgggcatgctgatacctgtcacttcgacgttaatgtgtgggaggcatcagggaatcgtagtggtggtgtctgtgatgactgtcagcacaacacagaaggacagtattgccagaggtgcaagccaggcttctatcgtgacctgcggagacccttctcagctccagatgcttgcaaaccgtgttcctgccatccagtaggatcagctgtccttcctgccaactcagtgaccttctgcgaccccagcaatggtgactgcccttgcaagcctggggtggcagggcgacgttgtgacaggtgcatggtgggatactggggcttcggagactatggctgtcgaccatgtgactgtgcggggagctgtgaccctatcaccggagactgcatcagcagccacacagacatagactggtatcatgaagttcctgacttccgtcccgtgcacaataagagcgaaccagcctgggagtgggaggatgcgcaggggttttctgcacttctacactcaggtaaatgcgaatgtaaggaacagacattaggaaat

SEQ ID NO: 310 - protein, 496 aa, Homo sapiens
LSGVAGVSSRCEKACNPRMGNLALGRKLWADTTCGQNATELYCFYSENKDLTCRQPKCDKCNAAYPHLAHLPSAMADSSFRFPRTWWQSAEDVHREKIQLDLEAEFYFTHLIVMFKSPRPAAMVLDRSQDFGKTWKPYKYFATNCSATFGLEDDVVKKGAICTSKYSSPFPCTGGEVIFKALSPPHDTENPYSAKVQEQLKITNLRVQLLKRQSCPCQRNDLNEEPQHFTHYAIYDFIVKGSCFCNGHADQCIPVHGFRPVKAPGTFHMVHGKCMCKHNTAGSHCQHCAPLYNDRPWEAADGKTGAPNECRTCKCNGHADTCHFDVNVWEASGNRSGGVCDDCQHNTEGQYCQRCKPGFYRDLRRPFSAPDACKPCSCHPVGSAVLPANSVTFCDPSNGDCPCKPGVAGRRCDRCMVGYWGFGDYGCRPCDCAGSCDPITGDCISSHTDIDWYHEVPDFRPVHNKSEPAWEWEDAQGFSALLHSGKCECKEQTLGN

SEQ ID NO: 311 - DNA, 1488 bp, Homo sapiens
  CDS (1)..(1488)
ctgagtggagtagctggagtgagttcccgctgtgaaaaagcctgcaaccctcggatgggaaatttggctttggggcgaaaactctgggcagacaccacctgcggtcagaatgctaccgaactgtactgcttctacagtgagaacaaggatctgacttgtcggcagcccaaatgtgacaagtgcaatgctgcctatcctcacctggctcacctgccatctgccatggcagactcatccttccggtttcctcgcacatggtggcagtctgcggaggatgtgcacagagaaaagatccagttagacctggaagctgaattctacttcactcacctaattgtgatgttcaagtcccccaggccggctgccatggtgctggaccgctcccaggactttgggaaaacatggaagccttataagtactttgcgactaactgctccgctacatttggcctggaagatgatgttgtcaagaagggcgctatttgtacttctaaatactccagtccttttccatgcactggaggagaggttattttcaaagctttgtcaccaccacacgatacagagaacccttacagtgccaaagttcaggagcagctgaagatcaccaaccttcgcgtgcagctgctgaaacgacagtcttgtccctgtcagagaaatgacctgaacgaagagcctcaacattttacacactatgcgatctatgatttcattgtcaagggcagctgcttctgcaatggccacgccgatcaatgcatacctgttcatggcttcagacctgtcaaggccccaggaacattccacatggtccatgggaagtgtatgtgtaagcacaacacagcaggcagccactgccagcactgtgccccgttatacaatgaccggccatgggaggcagctgatggcaaaacgggggctcccaacgagtgcagaacccgcaagtgtaatgggcatgctgatacctgtcacttcgacgttaatgtgtgggaggcatcagggagtcgtagtggtggtgtctgtgatgactgtcagcacaacacagaaggacagtattgccagaggtgcaagccaggcttctatcgtgacctgcggagacccttctcagctccagatgcttgcaaaccgtgttcctgccatccagtaggatcagctgtccttcctgccaactcagtgaccttctgcgaccccagcaatggtgactgcccttgcaagcctggggtggcagggcgacgttgtgacaggtgcatggtgggatactggggcttcggagactatggctgtcgaccatgtgactgtgcggggagctgtgaccctatcaccggagactgcatcagcagccacacagacatagactggtgtcatgaagttcctgacttccgtcccgtgcacaataagagcgaaccagcctgggagtgggaggatgcgcaggggttttctgcacttctacactcaggtaaatgcgaatgtaaggaacagacattaggaaat

SEQ ID NO: 312 - protein, 496 aa, Homo sapiens
LSGVAGVSSRCEKACNPRMGNLALGRKLWADTTCGQNATELYCFYSENKDLTCRQPKCDKCNAAYPHLAHLPSAMADSSFRFPRTWWQSAEDVHREKIQLDLEAEFYFTHLIVMFKSPRPAAMVLDRSQDFGKTWKPYKYFATNCSATFGLEDDVVKKGAICTSKYSSPFPCTGGEVIFKALSPPHDTENPYSAKVQEQLKITNLRVQLLKRQSCPCQRNDLNEEPQHFTHYAIYDFIVKGSCFCNGHADQCIPVHGFRPVKAPGTFHMVHGKCMCKHNTAGSHCQHCAPLYNDRPWEAADGKTGAPNECRTRKCNGHADTCHFDVNVWEASGSRSGGVCDDCQHNTEGQYCQRCKPGFYRDLRRPFSAPDACKPCSCHPVGSAVLPANSVTFCDPSNGDCPCKPGVAGRRCDRCMVGYWGFGDYGCRPCDCAGSCDPITGDCISSHTDIDWCHEVPDFRPVHNKSEPAWEWEDAQGFSALLHSGKCECKEQTLGN

SEQ ID NO: 313 - DNA, 1488 bp, Homo sapiens
  CDS (1)..(1488)
ctgagtggagtagctggagtgagttcccgctgtgaaaaagcctgcaaccctcggatgggaaatttggctttggggcgaaaactctgggcagacaccacctgcggtcagaatgctaccgaactgtactgcttctacagtgagaacaaggatctgacttgtcggcagcccaaatgtgacaagtgcaatgctgcctatcctcacctggctcacctgccatctgccatggcagactcatccttccggtttcctcgcacatggtggcagtctgcggaggatgtgcacagagaaaagatccagttagacctggaagctgaattctacttcactcacctaattgtgatgttcaagtcccccaggccggctgccatggtgctggaccgctcccaggactttgggaaaacatggaagccttataagtactttgcgactaactgctccgctacatttggcctggaagatgatgttgtcaagaagggcgctatttgtacttctaaatactccagtccttttccatgcactggaggagaggttattttcaaagctttgtcaccaccacacgatacagagaacccttacagtgccaaagttcaggagcagctgaagatcaccaaccttcgcgtgcagctgctgaaacgacagtcttgtccctgtcagagaaatgacctgaacgaagagcctcaacattttacacactatgcgatctatgatttcattgtcaagggcagctgcttctgcaatggccacgccgatcaatgcatacctgttcatggcttcagacctgtcaaggccccaggaacattccacatggtccatgggaagtgtatgtgtaagcacaacacagcaggcagccactgccagcactgtgccccgttatacaatgaccggccatgggaggcagctgatggcaaaacgggggctcccaacgagtgcagaacccgcaagtgtaatgggcatgctgatacctgtcacttcgacgttaatgtgtgggaggcatcagggaatcgtagtggtggtgtctgtgatgactgtcagcacaacacagaaggacagtattgccagaggtgcaagccaggcttctatcgtgacctgcggagacccttctcagctccagatgcttgcaaaccgtgttcctgccatccagtaggatcagctgtccttcctgccaactcagtgaccttctgcgaccccagcaatggtgactgcccttgcaagcctggggtggcagggcgacgttgtgacaggtgcatggtgggatactggggcttcggagactatggctgtcgaccatgtgactgtgcggggagctgtgaccctatcaccggagactgcatcagcagccacacagacatagactggtatcatgaagttcctgacttccgtcccgtgcacaataagagcgaaccagcctgggagtgggaggatgcgcaggggttttctgcacttctacactcaggtaaatgcgaatgtaaggaacagacattaggaaat

SEQ ID NO: 314 - protein, 496 aa, Homo sapiens
LSGVAGVSSRCEKACNPRMGNLALGRKLWADTTCGQNATELYCFYSENKDLTCRQPKCDKCNAAYPHLAHLPSAMADSSFRFPRTWWQSAEDVHREKIQLDLEAEFYFTHLIVMFKSPRPAAMVLDRSQDFGKTWKPYKYFATNCSATFGLEDDVVKKGAICTSKYSSPFPCTGGEVIFKALSPPHDTENPYSAKVQEQLKITNLRVQLLKRQSCPCQRNDLNEEPQHFTHYAIYDFIVKGSCFCNGHADQCIPVHGFRPVKAPGTFHMVHGKCMCKHNTAGSHCQHCAPLYNDRPWEAADGKTGAPNECRTRKCNGHADTCHFDVNVWEASGNRSGGVCDDCQHNTEGQYCQRCKPGFYRDLRRPFSAPDACKPCSCHPVGSAVLPANSVTFCDPSNGDCPCKPGVAGRRCDRCMVGYWGFGDYGCRPCDCAGSCDPITGDCISSHTDIDWYHEVPDFRPVHNKSEPAWEWEDAQGFSALLHSGKCECKEQTLGN

SEQ ID NO: 315 - DNA, 1488 bp, Homo sapiens
  CDS (1)..(1488)
ctgagtggagtagctggagtgagttcccgctgtgaaaaagcctgcaaccctcggatgggaaatttggctttggggcgaaaactctgggcagacaccacctgcggtcagaatgctaccgaactgtactgcttctacagtgagaacaaggatctgacttgtcggcagcccaaatgtgacaagtgcaatgctgcctatcctcacctggctcacctgccatctgccatggcagactcatccttccggtttcctcgcacatggtggcagtctgcggaggatgtgcacagagaaaagatccagttagacctggaagctgaattctacttcactcacctaattgtgatgttcaagtcccccaggccggctgccatggtgctggaccgctcccaggactttgggaaaacatggaagccttataagtactttgcgactaactgctccgctacatttggcctggaagatgatgttgtcaagaagggcgctatttgtacttctaaatactccagtccttttccatgcactggaggagaggttattttcaaagctttgtcaccaccacacgatacagagaacccttacagtgccaaagttcaggagcagctgaagatcaccaaccttcgcgtgcagctgctgaaacgacagtcttgtccctgtcagagaaatgacctgaacgaagagcctcaacattttacacactatgcgatctatgatttcattgtcaagggcagctgcttctgcaatggccacgccgatcaatgcatacctgttcatggcttcagacctgtcaaggccccaggaacattccacatggtccatgggaagtgtatgtgtaagcacaacacagcaggcagccactgccagcactgtgccccgttatacaatgaccggccatgggaggcagctgatggcaaaacgggggctcccaacgagtgcagaacctgcaagtgtaatgggcatgctgatacctgtcacttcgacgttaatgtgtgggaggcatcagggagtcgtagtggtggtgtctgtgatgactgtcagcacaacacagaaggacagtattgccagaggtgcaagccaggcttctatcgtgacctgcggagacccttctcagctccagatgcttgcaaaccgtgttcctgccatccagtaggatcagctgtccttcctgccaactcagtgaccttctgcgaccccagcaatggtgactgcccttgcaagcctggggtggcagggcgacgttgtgacaggtgcatggtgggatactggggcttcggagactatggctgtcgaccatgtgactgtgcggggagctgtgaccctatcaccggagactgcatcagcagccacacagacatagactggtatcatgaagttcctgacttccgtcccgtgcacaataagagcgaaccagcctgggagtgggaggatgcgcaggggttttctgcacttctacactcaggtaaatgcgaatgtaaggaacagacattaggaaat

SEQ ID NO: 316 - protein, 496 aa, Homo sapiens
LSGVAGVSSRCEKACNPRMGNLALGRKLWADTTCGQNATELYCFYSENKDLTCRQPKCDKCNAAYPHLAHLPSAMADSSFRFPRTWWQSAEDVHREKIQLDLEAEFYFTHLIVMFKSPRPAAMVLDRSQDFGKTWKPYKYFATNCSATFGLEDDVVKKGAICTSKYSSPFPCTGGEVIFKALSPPHDTENPYSAKVQEQLKITNLRVQLLKRQSCPCQRNDLNEEPQHFTHYAIYDFIVKGSCFCNGHADQCIPVHGFRPVKAPGTFHMVHGKCMCKHNTAGSHCQHCAPLYNDRPWEAADGKTGAPNECRTCKCNGHADTCHFDVNVWEASGSRSGGVCDDCQHNTEGQYCQRCKPGFYRDLRRPFSAPDACKPCSCHPVGSAVLPANSVTFCDPSNGDCPCKPGVAGRRCDRCMVGYWGFGDYGCRPCDCAGSCDPITGDCISSHTDIDWYHEVPDFRPVHNKSEPAWEWEDAQGFSALLHSGKCECKEQTLGN

SEQ ID NO: 317 - DNA, 1488 bp, Homo sapiens
  CDS (1)..(1488)
ctgagtggagtagctggagtgagttcccgctgtgaaaaagcctgcaaccctcggatgggaaatttggctttggggcgaaaactctgggcagacaccacctgcggtcagaatgctaccgaactgtactgcttctacagtgagaacaaggatctgacttgtcggcagcccaaatgtgacaagtgcaatgctgcctatcctcacctggctcacctgccatctgccatggcagactcatccttccggtttcctcgcacatggtggcagtctgcggaggatgtgcacagagaaaagatccagttagacctggaagctgaattctacttcactcacctaattgtgatgttcaagtcccccaggccggctgccatggtgctggaccgctcccaggactttgggaaaacatggaagccttataagtactttgcgactaactgctccgctacatttggcctggaagatgatgttgtcaagaagggcgctatttgtacttctaaatactccagtccttttccatgcactggaggagaggttattttcaaagctttgtcaccaccacacgatacagagaacccttacagtgccaaagttcaggagcagctgaagatcaccaaccttcgcgtgcagctgctgaaacgacagtcttgtccctgtcagagaaatgacctgaacgaagagcctcaacattttacacactatgcgatctatgatttcattgtcaagggcagctgcttctgcaatggccacgccgatcaatgcatacctgttcatggcttcagacctgtcaaggccccaggaacattccacatggtccatgggaagtgtatgtgtaagcacaacacagcaggcagccactgccagcactgtgccccgttatacaatgaccggccatgggaggcagctgatggcaaaacgggggctcccaacgagtgcagaacccgcaagtgtaatgggcatgctgatacctgtcacttcgacgttaatgtgtgggaggcatcagggagtcgtagtggtggtgtctgtgatgactgtcagcacaacacagaaggacagtattgccagaggtgcaagccaggcttctatcgtgacctgcggagacccttctcagctccagatgcttgcaaaccgtgttcctgccatccagtaggatcagctgtccttcctgccaactcagtgaccttctgcgaccccagcaatggtgactgcccttgcaagcctggggtggcagggcgacgttgtgacaggtgcatggtgggatactggggcttcggagactatggctgtcgaccatgtgactgtgcggggagctgtgaccctatcaccggagactgcatcagcagccacacagacatagactggtatcatgaagttcctgacttccgtcccgtgcacaataagagcgaaccagcctgggagtgggaggatgcgcaggggttttctgcacttctacactcaggtaaatgcgaatgtaaggaacagacattaggaaat

SEQ ID NO: 318 - protein, 496 aa, Homo sapiens
LSGVAGVSSRCEKACNPRMGNLALGRKLWADTTCGQNATELYCFYSENKDLTCRQPKCDKCNAAYPHLAHLPSAMADSSFRFPRTWWQSAEDVHREKIQLDLEAEFYFTHLIVMFKSPRPAAMVLDRSQDFGKTWKPYKYFATNCSATFGLEDDVVKKGAICTSKYSSPFPCTGGEVIFKALSPPHDTENPYSAKVQEQLKITNLRVQLLKRQSCPCQRNDLNEEPQHFTHYAIYDFIVKGSCFCNGHADQCIPVHGFRPVKAPGTFHMVHGKCMCKHNTAGSHCQHCAPLYNDRPWEAADGKTGAPNECRTRKCNGHADTCHFDVNVWEASGSRSGGVCDDCQHNTEGQYCQRCKPGFYRDLRRPFSAPDACKPCSCHPVGSAVLPANSVTFCDPSNGDCPCKPGVAGRRCDRCMVGYWGFGDYGCRPCDCAGSCDPITGDCISSHTDIDWYHEVPDFRPVHNKSEPAWEWEDAQGFSALLHSGKCECKEQTLGN

SEQ ID NO: 319 - DNA, 1482 bp, Homo sapiens
  CDS (1)..(1482)
aaagcctgcaaccctcggatgggaaatttggctttggggcgaaaactctgggcagacaccacctgcggtcagaatgctaccgaactgtactgcttctacagtgagaacacggatctgacttgtcggcagcccaaatgtgacaagtgcaatgctgcctatcctcacctggctcacctgccatctgccatggcagactcatccttccggtttcctcgcacatggtggcagtctgcggaggatgtgcacagagaaaagatccagttagacctggaagctgaattctacttcactcacctaattgtgatgttcaagtcccccaggccggctgccatggtgctggaccgctcccaggactttgggaaaacatggaagccttataagtactttgcgactaactgctccgctacatttggcctggaagatgatgttgtcaagaagggcgctatttgtactcctaaatactccagtccttttccatgcactggaggagaggttattttcaaagctttgtcaccaccatacgatacagagaacccttacagtgccaaagttcaggagcagctgaagatcaccaaccttcgcgtgcagctgctgaaacgacagtcttatccctgtcagagaaatgacctgaacgaagagcctcaacattttacacactatgcgatctatgatttcattgtcaagggcagctgcttctgcaatggccacgccgatcaatgcatacctgttcatggcttcagacctgtcaaggccccaggaacattccacatggtccatgggaagtgtatgtgtaagcacaacacagcaggcagccactgccagcactgtgccccgttatacaatgaccggccatgggaggcagctgatggcaaaacgggggctcccaacgagtgcagaacccgcaagtgtaatgggcatgctgatacctgtcacttcgacgttaatgtgtgggaggcatcagggagtcgtagtggtggtgtctgtgatgactgtcagcacaacacagaaggacagtattgccagaggtgcaagccaggcttctatcgtgacctgcggagacccttctcagctccagatgcttgcaaaccgtgttcctgccatccagtaggatcagctgtccttcctgccaactcagtgaccttctgcgaccccagcaatggtgactgcccttgcaagcctggggtggcagggcgacgttgtgacaggtgcatggtgggatactggggcttcggagactatggctgtcgaccatgtgactgtgcggggagctgtgaccctatcaccggagactgcatcagcagccacacagacatagactggtatcatgaagttcctgacttccgtcccgtgcacaataagagcgaaccagcctgggagtgggaggatgcgcaggggttttctgcacttctacactcaggtaaatgcgaatgtaaggaacagacattaggaaagggatccgagctcggtaccaagcttacgtag

SEQ ID NO: 320 - protein, 493 aa, Homo sapiens
KACNPRMGNLALGRKLWADTTCGQNATELYCFYSENTDLTCRQPKCDKCNAAYPHLAHLPSAMADSSFRFPRTWWQSAEDVHREKIQLDLEAEFYFTHLIVMFKSPRPAAMVLDRSQDFGKTWKPYKYFATNCSATFGLEDDVVKKGAICTPKYSSPFPCTGGEVIFKALSPPYDTENPYSAKVQEQLKITNLRVQLLKRQSYPCQRNDLNEEPQHFTHYAIYDFIVKGSCFCNGHADQCIPVHGFRPVKAPGTFHMVHGKCMCKHNTAGSHCQHCAPLYNDRPWEAADGKTGAPNECRTRKCNGHADTCHFDVNVWEASGSRSGGVCDDCQHNTEGQYCQRCKPGFYRDLRRPFSAPDACKPCSCHPVGSAVLPANSVTFCDPSNGDCPCKPGVAGRRCDRCMVGYWGFGDYGCRPCDCAGSCDPITGDCISSHTDIDWYHEVPDFRPVHNKSEPAWEWEDAQGFSALLHSGKCECKEQTLGKGSELGTKLT

SEQ ID NO: 321 - DNA, 1452 bp, Homo sapiens
  CDS (1)..(1452)
aaagcctgcaaccctcggatgggaaatttggctttggggcgaaaactctgggcagacaccacctgcggtcagaatgctaccgaactgtactgcttctacagtgagaacacggatctgacttgtcggcagcccaaatgtgacaagtgcaatgctgcctatcctcacctggctcacctgccatctgccatggcagactcatccttccggtttcctcgcacatggtggcagtctgcggaggatgtgcacagagaaaagatccagttagacctggaagctgaattctacttcactcacctaattgtgatgttcaagtcccccaggccggctgccatggtgctggaccgctcccaggactttgggaaaacatggaagccttataagtactttgcgactaactgctccgctacatttggcctggaagatgatgttgtcaagaagggcgctatttgtactcctaaatactccagtccttttccatgcactggaggagaggttattttcaaagctttgtcaccaccatacgatacagagaacccttacagtgccaaagttcaggagcagctgaagatcaccaaccttcgcgtgcagctgctgaaacgacagtcttatccctgtcagagaaatgacctgaacgaagagcctcaacattttacacactatgcgatctatgatttcattgtcaagggcagctgcttctgcaatggccacgccgatcaatgcatacctgttcatggcttcagacctgtcaaggccccaggaacattccacatggtccatgggaagtgtatgtgtaagcacaacacagcaggcagccactgccagcactgtgccccgttatacaatgaccggccatgggaggcagctgatggcaaaacgggggctcccaacgagtgcagagcccgcaagtgtaatgggcatgctgatacctgtcacttcgacgttaatgtgtgggaggcatcagggagtcgtagtggtggtgtctgtgatgactgtcagcacaacacagaaggacagtattgccagaggtgcaagccaggcttctatcgtgacctgcggagacccttctcagctccagatgcttgcaaaccgtgttcctgccatccagtaggatcagctgtccttcctgccaactcagtgaccttctgcgaccccagcaatggtgactgcccttgcaagcctggggtggcagggcgacgttgtgacaggtgcatggtgggatactggggcttcggagactatggctgtcgaccatgtgactgtgcggggagctgtgaccctatcaccggagactgcatcagcagccacacagacatagactggtatcatgaagttcctgacttccgtcccgtgcacaataagagcgaaccagcctgggagtgggaggatgcgcaggggttttctgcacttctacactcaggtaaatgcgaatgtaaggaacagacattaggaaag

SEQ ID NO: 322 - protein, 484 aa, Homo sapiens
KACNPRMGNLALGRKLWADTTCGQNATELYCFYSENTDLTCRQPKCDKCNAAYPHLAHLPSAMADSSFRFPRTWWQSAEDVHREKIQLDLEAEFYFTHLIVMFKSPRPAAMVLDRSQDFGKTWKPYKYFATNCSATFGLEDDVVKKGAICTPKYSSPFPCTGGEVIFKALSPPYDTENPYSAKVQEQLKITNLRVQLLKRQSYPCQRNDLNEEPQHFTHYAIYDFIVKGSCFCNGHADQCIPVHGFRPVKAPGTFHMVHGKCMCKHNTAGSHCQHCAPLYNDRPWEAADGKTGAPNECRARKCNGHADTCHFDVNVWEASGSRSGGVCDDCQHNTEGQYCQRCKPGFYRDLRRPFSAPDACKPCSCHPVGSAVLPANSVTFCDPSNGDCPCKPGVAGRRCDRCMVGYWGFGDYGCRPCDCAGSCDPITGDCISSHTDIDWYHEVPDFRPVHNKSEPAWEWEDAQGFSALLHSGKCECKEQTLGK

SEQ ID NO: 323 - DNA, 1452 bp, Homo sapiens
  CDS (1)..(1452)
aaagcctgcaaccctcggatgggaaatttggctttggggcgaaaactctgggcagacaccacctgcggtcagaatgctaccgaactgtactgcttctacagtgagaacacggatctgacttgtcggcagcccaaatgtgacaagtgcaatgctgcctatcctcacctggctcacctgccatctgccatggcagactcatccttccggtttcctcgcacatggtggcagtctgcggaggatgtgcacagagaaaagatccagttagacctggaagctgaattctacttcactcacctaattgtgatgttcaagtcccccaggccggctgccatggtgctggaccgctcccaggactttgggaaaacatggaagccttataagtactttgcgactaactgctccgctacatttggcctggaagatgatgttgtcaagaagggcgctatttgtactcctaaatactccagtccttttccatgcactggaggagaggttattttcaaagctttgtcaccaccatacgatacagagaacccttacagtgccaaagttcaggagcagctgaagatcaccaaccttcgcgtgcagctgctgaaacgacagtcttatccctgtcagagaaatgacctgaacgaagagcctcaacattttacacactatgcgatctatgatttcattgtcaagggcagctgcttctgcaatggccacgccgatcaatgcatacctgttcatggcttcagacctgtcaaggccccaggaacattccacatggtccatgggaagtgtatgtgtaagcacaacacagcaggcagccactgccagcactgtgccccgttatacaatgaccggccatgggaggcagctgatggcaaaacgggggctcccaacgagtgcagaacctgcaagtgtaatgggcatgctgatacctgtcacttcgacgttaatgtgtgggaggcatcagggagtcgtagtggtggtgtctgtgatgactgtcagcacaacacagaaggacagtattgccagaggtgcaagccaggcttctatcgtgacctgcggagacccttctcagctccagatgcttgcaaaccgtgttcctgccatccagtaggatcagctgtccttcctgccaactcagtgaccttctgcgaccccagcaatggtgactgcccttgcaagcctggggtggcagggcgacgttgtgacaggtgcatggtgggatactggggcttcggagactatggctgtcgaccatgtgactgtgcggggagctgtgaccctatcaccggagactgcatcagcagccacacagacatagactggtatcatgaagttcctgacttccgtcccgtgcacaataagagcgaaccagcctgggagtgggaggatgcgcaggggttttctgcacttctacactcaggtaaatgcgaatgtaaggaacagacattaggaaag

SEQ ID NO: 324 - protein, 484 aa, Homo sapiens
KACNPRMGNLALGRKLWADTTCGQNATELYCFYSENTDLTCRQPKCDKCNAAYPHLAHLPSAMADSSFRFPRTWWQSAEDVHREKIQLDLEAEFYFTHLIVMFKSPRPAAMVLDRSQDFGKTWKPYKYFATNCSATFGLEDDVVKKGAICTPKYSSPFPCTGGEVIFKALSPPYDTENPYSAKVQEQLKITNLRVQLLKRQSYPCQRNDLNEEPQHFTHYAIYDFIVKGSCFCNGHADQCIPVHGFRPVKAPGTFHMVHGKCMCKHNTAGSHCQHCAPLYNDRPWEAADGKTGAPNECRTCKCNGHADTCHFDVNVWEASGSRSGGVCDDCQHNTEGQYCQRCKPGFYRDLRRPFSAPDACKPCSCHPVGSAVLPANSVTFCDPSNGDCPCKPGVAGRRCDRCMVGYWGFGDYGCRPCDCAGSCDPITGDCISSHTDIDWYHEVPDFRPVHNKSEPAWEWEDAQGFSALLHSGKCECKEQTLGK

SEQ ID NO: 325 - DNA, 1452 bp, Homo sapiens
  CDS (1)..(1452)
aaagcctgcaaccctcggatgggaaatttggctttggggcgaaaactctgggcagacaccacctgcggtcagaatgctaccgaactgtactgcttctacagtgagaacacggatctgacttgtcggcagcccaaatgtgacaagtgcaatgctgcctatcctcacctggctcacctgccatctgccatggcagactcatccttccggtttcctcgcacatggtggcagtctgcggaggatgtgcacagagaaaagatccagttagacctggaagctgaattctacttcactcacctaattgtgatgttcaagtcccccaggccggctgccatggtgctggaccgctcccaggactttgggaaaacatggaagccttataagtactttgcgactaactgctccgctacatttggcctggaagatgatgttgtcaagaagggcgctatttgtactcctaaatactccagtccttttccatgcactggaggagaggttattttcaaagctttgtcaccaccatacgatacagagaacccttacagtgccaaagttcaggagcagctgaagatcaccaaccttcgcgtgcagctgctgaaacgacagtcttatccctgtcagagaaatgacctgaacgaagagcctcaacattttacacactatgcgatctatgatttcattgtcaagggcagctgcttctgcaatggccacgccgatcaatgcatacctgttcatggcttcagacctgtcaaggccccaggaacattccacatggtccatgggaagtgtatgtgtaagcacaacacagcaggcagccactgccagcactgtgccccgttatacaatgaccggccatgggaggcagctgatggcaaaacgggggctcccaacgagtgcagaacccgcaagtgtaatgggcatgctgatacctgtcacttcgacgttaatgtgtgggaggcatcagggaatcgtagtggtggtgtctgtgatgactgtcagcacaacacagaaggacagtattgccagaggtgcaagccaggcttctatcgtgacctgcggagacccttctcagctccagatgcttgcaaaccgtgttcctgccatccagtaggatcagctgtccttcctgccaactcagtgaccttctgcgaccccagcaatggtgactgcccttgcaagcctggggtggcagggcgacgttgtgacaggtgcatggtgggatactggggcttcggagactatggctgtcgaccatgtgactgtgcggggagctgtgaccctatcaccggagactgcatcagcagccacacagacatagactggtatcatgaagttcctgacttccgtcccgtgcacaataagagcgaaccagcctgggagtgggaggatgcgcaggggttttctgcacttctacactcaggtaaatgcgaatgtaaggaacagacattaggaaag

SEQ ID NO: 326 - protein, 484 aa, Homo sapiens
KACNPRMGNLALGRKLWADTTCGQNATELYCFYSENTDLTCRQPKCDKCNAAYPHLAHLPSAMADSSFRFPRTWWQSAEDVHREKIQLDLEAEFYFTHLIVMFKSPRPAAMVLDRSQDFGKTWKPYKYFATNCSATFGLEDDVVKKGAICTPKYSSPFPCTGGEVIFKALSPPYDTENPYSAKVQEQLKITNLRVQLLKRQSYPCQRNDLNEEPQHFTHYAIYDFIVKGSCFCNGHADQCIPVHGFRPVKAPGTFHMVHGKCMCKHNTAGSHCQHCAPLYNDRPWEAADGKTGAPNECRTRKCNGHADTCHFDVNVWEASGNRSGGVCDDCQHNTEGQYCQRCKPGFYRDLRRPFSAPDACKPCSCHPVGSAVLPANSVTFCDPSNGDCPCKPGVAGRRCDRCMVGYWGFGDYGCRPCDCAGSCDPITGDCISSHTDIDWYHEVPDFRPVHNKSEPAWEWEDAQGFSALLHSGKCECKEQTLGK

SEQ ID NO: 327 - DNA, 1452 bp, Homo sapiens
  CDS (1)..(1452)
aaagcctgcaaccctcggatgggaaatttggctttggggcgaaaactctgggcagacaccacctgcggtcagaatgctaccgaactgtactgcttctacagtgagaacacggatctgacttgtcggcagcccaaatgtgacaagtgcaatgctgcctatcctcacctggctcacctgccatctgccatggcagactcatccttccggtttcctcgcacatggtggcagtctgcggaggatgtgcacagagaaaagatccagttagacctggaagctgaattctacttcactcacctaattgtgatgttcaagtcccccaggccggctgccatggtgctggaccgctcccaggactttgggaaaacatggaagccttataagtactttgcgactaactgctccgctacatttggcctggaagatgatgttgtcaagaagggcgctatttgtactcctaaatactccagtccttttccatgcactggaggagaggttattttcaaagctttgtcaccaccatacgatacagagaacccttacagtgccaaagttcaggagcagctgaagatcaccaaccttcgcgtgcagctgctgaaacgacagtcttatccctgtcagagaaatgacctgaacgaagagcctcaacattttacacactatgcgatctatgatttcattgtcaagggcagctgcttctgcaatggccacgccgatcaatgcatacctgttcatggcttcagacctgtcaaggccccaggaacattccacatggtccatgggaagtgtatgtgtaagcacaacacagcaggcagccactgccagcactgtgccccgttatacaatgaccggccatgggaggcagctgatggcaaaacgggggctcccaacgagtgcagaacccgcaagtgtaatgggcatgctgatacctgtcacttcgacgttaatgtgtgggaggcatcagggagtcgtagtggtggtgtctgtgatgactgtcagcacaacacagaaggacagtattgccagaggtgcaagccaggcttctatcgtgacctgcggagacccttctcagctccagatgcttgcaaaccgtgttcctgccatccagtaggatcagctgtccttcctgccaactcagtgaccttctgcgaccccagcaatggtgactgcccttgcaagcctggggtggcagggcgacgttgtgacaggtgcatggtgggatactggggcttcggagactatggctgtcgaccatgtgactgtgcggggagctgtgaccctatcaccggagactgcatcagcagccacacagacatagactggtgtcatgaagttcctgacttccgtcccgtgcacaataagagcgaaccagcctgggagtgggaggatgcgcaggggttttctgcacttctacactcaggtaaatgcgaatgtaaggaacagacattaggaaag

SEQ ID NO: 328 - protein, 484 aa, Homo sapiens
KACNPRMGNLALGRKLWADTTCGQNATELYCFYSENTDLTCRQPKCDKCNAAYPHLAHLPSAMADSSFRFPRTWWQSAEDVHREKIQLDLEAEFYFTHLIVMFKSPRPAAMVLDRSQDFGKTWKPYKYFATNCSATFGLEDDVVKKGAICTPKYSSPFPCTGGEVIFKALSPPYDTENPYSAKVQEQLKITNLRVQLLKRQSYPCQRNDLNEEPQHFTHYAIYDFIVKGSCFCNGHADQCIPVHGFRPVKAPGTFHMVHGKCMCKHNTAGSHCQHCAPLYNDRPWEAADGKTGAPNECRTRKCNGHADTCHFDVNVWEASGSRSGGVCDDCQHNTEGQYCQRCKPGFYRDLRRPFSAPDACKPCSCHPVGSAVLPANSVTFCDPSNGDCPCKPGVAGRRCDRCMVGYWGFGDYGCRPCDCAGSCDPITGDCISSHTDIDWCHEVPDFRPVHNKSEPAWEWEDAQGFSALLHSGKCECKEQTLGK

SEQ ID NO: 329 - DNA, 1452 bp, Homo sapiens
  CDS (1)..(1452)
aaagcctgcaaccctcggatgggaaatttggctttggggcgaaaactctgggcagacaccacctgcggtcagaatgctaccgaactgtactgcttctacagtgagaacacggatctgacttgtcggcagcccaaatgtgacaagtgcaatgctgcctatcctcacctggctcacctgccatctgccatggcagactcatccttccggtttcctcgcacatggtggcagtctgcggaggatgtgcacagagaaaagatccagttagacctggaagctgaattctacttcactcacctaattgtgatgttcaagtcccccaggccggctgccatggtgctggaccgctcccaggactttgggaaaacatggaagccttataagtactttgcgactaactgctccgctacatttggcctggaagatgatgttgtcaagaagggcgctatttgtactcctaaatactccagtccttttccatgcactggaggagaggttattttcaaagctttgtcaccaccatacgatacagagaacccttacagtgccaaagttcaggagcagctgaagatcaccaaccttcgcgtgcagctgctgaaacgacagtcttatccctgtcagagaaatgacctgaacgaagagcctcaacattttacacactatgcgatctatgatttcattgtcaagggcagctgcttctgcaatggccacgccgatcaatgcatacctgttcatggcttcagacctgtcaaggccccaggaacattccacatggtccatgggaagtgtatgtgtaagcacaacacagcaggcagccactgccagcactgtgccccgttatacaatgaccggccatgggaggcagctgatggcaaaacgggggctcccaacgagtgcagagcctgcaagtgtaatgggcatgctgatacctgtcacttcgacgttaatgtgtgggaggcatcagggagtcgtagtggtggtgtctgtgatgactgtcagcacaacacagaaggacagtattgccagaggtgcaagccaggcttctatcgtgacctgcggagacccttctcagctccagatgcttgcaaaccgtgttcctgccatccagtaggatcagctgtccttcctgccaactcagtgaccttctgcgaccccagcaatggtgactgcccttgcaagcctggggtggcagggcgacgttgtgacaggtgcatggtgggatactggggcttcggagactatggctgtcgaccatgtgactgtgcggggagctgtgaccctatcaccggagactgcatcagcagccacacagacatagactggtatcatgaagttcctgacttccgtcccgtgcacaataagagcgaaccagcctgggagtgggaggatgcgcaggggttttctgcacttctacactcaggtaaatgcgaatgtaaggaacagacattaggaaag

SEQ ID NO: 330 - protein, 484 aa, Homo sapiens
KACNPRMGNLALGRKLWADTTCGQNATELYCFYSENTDLTCRQPKCDKCNAAYPHLAHLPSAMADSSFRFPRTWWQSAEDVHREKIQLDLEAEFYFTHLIVMFKSPRPAAMVLDRSQDFGKTWKPYKYFATNCSATFGLEDDVVKKGAICTPKYSSPFPCTGGEVIFKALSPPYDTENPYSAKVQEQLKITNLRVQLLKRQSYPCQRNDLNEEPQHFTHYAIYDFIVKGSCFCNGHADQCIPVHGFRPVKAPGTFHMVHGKCMCKHNTAGSHCQHCAPLYNDRPWEAADGKTGAPNECRACKCNGHADTCHFDVNVWEASGSRSGGVCDDCQHNTEGQYCQRCKPGFYRDLRRPFSAPDACKPCSCHPVGSAVLPANSVTFCDPSNGDCPCKPGVAGRRCDRCMVGYWGFGDYGCRPCDCAGSCDPITGDCISSHTDIDWYHEVPDFRPVHNKSEPAWEWEDAQGFSALLHSGKCECKEQTLGK

SEQ ID NO: 331 - DNA, 1452 bp, Homo sapiens
  CDS (1)..(1452)
aaagcctgcaaccctcggatgggaaatttggctttggggcgaaaactctgggcagacaccacctgcggtcagaatgctaccgaactgtactgcttctacagtgagaacacggatctgacttgtcggcagcccaaatgtgacaagtgcaatgctgcctatcctcacctggctcacctgccatctgccatggcagactcatccttccggtttcctcgcacatggtggcagtctgcggaggatgtgcacagagaaaagatccagttagacctggaagctgaattctacttcactcacctaattgtgatgttcaagtcccccaggccggctgccatggtgctggaccgctcccaggactttgggaaaacatggaagccttataagtactttgcgactaactgctccgctacatttggcctggaagatgatgttgtcaagaagggcgctatttgtactcctaaatactccagtccttttccatgcactggaggagaggttattttcaaagctttgtcaccaccatacgatacagagaacccttacagtgccaaagttcaggagcagctgaagatcaccaaccttcgcgtgcagctgctgaaacgacagtcttatccctgtcagagaaatgacctgaacgaagagcctcaacattttacacactatgcgatctatgatttcattgtcaagggcagctgcttctgcaatggccacgccgatcaatgcatacctgttcatggcttcagacctgtcaaggccccaggaacattccacatggtccatgggaagtgtatgtgtaagcacaacacagcaggcagccactgccagcactgtgccccgttatacaatgaccggccatgggaggcagctgatggcaaaacgggggctcccaacgagtgcagagcccgcaagtgtaatgggcatgctgatacctgtcacttcgacgttaatgtgtgggaggcatcagggaatcgtagtggtggtgtctgtgatgactgtcagcacaacacagaaggacagtattgccagaggtgcaagccaggcttctatcgtgacctgcggagacccttctcagctccagatgcttgcaaaccgtgttcctgccatccagtaggatcagctgtccttcctgccaactcagtgaccttctgcgaccccagcaatggtgactgcccttgcaagcctggggtggcagggcgacgttgtgacaggtgcatggtgggatactggggcttcggagactatggctgtcgaccatgtgactgtgcggggagctgtgaccctatcaccggagactgcatcagcagccacacagacatagactggtatcatgaagttcctgacttccgtcccgtgcacaataagagcgaaccagcctgggagtgggaggatgcgcaggggttttctgcacttctacactcaggtaaatgcgaatgtaaggaacagacattaggaaag

SEQ ID NO: 332 - protein, 484 aa, Homo sapiens
KACNPRMGNLALGRKLWADTTCGQNATELYCFYSENTDLTCRQPKCDKCNAAYPHLAHLPSAMADSSFRFPRTWWQSAEDVHREKIQLDLEAEFYFTHLIVMFKSPRPAAMVLDRSQDFGKTWKPYKYFATNCSATFGLEDDVVKKGAICTPKYSSPFPCTGGEVIFKALSPPYDTENPYSAKVQEQLKITNLRVQLLKRQSYPCQRNDLNEEPQHFTHYAIYDFIVKGSCFCNGHADQCIPVHGFRPVKAPGTFHMVHGKCMCKHNTAGSHCQHCAPLYNDRPWEAADGKTGAPNECRARKCNGHADTCHFDVNVWEASGNRSGGVCDDCQHNTEGQYCQRCKPGFYRDLRRPFSAPDACKPCSCHPVGSAVLPANSVTFCDPSNGDCPCKPGVAGRRCDRCMVGYWGFGDYGCRPCDCAGSCDPITGDCISSHTDIDWYHEVPDFRPVHNKSEPAWEWEDAQGFSALLHSGKCECKEQTLGK

SEQ ID NO: 333 - DNA, 1452 bp, Homo sapiens
  CDS (1)..(1452)
aaagcctgcaaccctcggatgggaaatttggctttggggcgaaaactctgggcagacaccacctgcggtcagaatgctaccgaactgtactgcttctacagtgagaacacggatctgacttgtcggcagcccaaatgtgacaagtgcaatgctgcctatcctcacctggctcacctgccatctgccatggcagactcatccttccggtttcctcgcacatggtggcagtctgcggaggatgtgcacagagaaaagatccagttagacctggaagctgaattctacttcactcacctaattgtgatgttcaagtcccccaggccggctgccatggtgctggaccgctcccaggactttgggaaaacatggaagccttataagtactttgcgactaactgctccgctacatttggcctggaagatgatgttgtcaagaagggcgctatttgtactcctaaatactccagtccttttccatgcactggaggagaggttattttcaaagctttgtcaccaccatacgatacagagaacccttacagtgccaaagttcaggagcagctgaagatcaccaaccttcgcgtgcagctgctgaaacgacagtcttatccctgtcagagaaatgacctgaacgaagagcctcaacattttacacactatgcgatctatgatttcattgtcaagggcagctgcttctgcaatggccacgccgatcaatgcatacctgttcatggcttcagacctgtcaaggccccaggaacattccacatggtccatgggaagtgtatgtgtaagcacaacacagcaggcagccactgccagcactgtgccccgttatacaatgaccggccatgggaggcagctgatggcaaaacgggggctcccaacgagtgcagagcccgcaagtgtaatgggcatgctgatacctgtcacttcgacgttaatgtgtgggaggcatcagggagtcgtagtggtggtgtctgtgatgactgtcagcacaacacagaaggacagtattgccagaggtgcaagccaggcttctatcgtgacctgcggagacccttctcagctccagatgcttgcaaaccgtgttcctgccatccagtaggatcagctgtccttcctgccaactcagtgaccttctgcgaccccagcaatggtgactgcccttgcaagcctggggtggcagggcgacgttgtgacaggtgcatggtgggatactggggcttcggagactatggctgtcgaccatgtgactgtgcggggagctgtgaccctatcaccggagactgcatcagcagccacacagacatagactggtgtcatgaagttcctgacttccgtcccgtgcacaataagagcgaaccagcctgggagtgggaggatgcgcaggggttttctgcacttctacactcaggtaaatgcgaatgtaaggaacagacattaggaaag

SEQ ID NO: 334 - protein, 484 aa, Homo sapiens
KACNPRMGNLALGRKLWADTTCGQNATELYCFYSENTDLTCRQPKCDKCNAAYPHLAHLPSAMADSSFRFPRTWWQSAEDVHREKIQLDLEAEFYFTHLIVMFKSPRPAAMVLDRSQDFGKTWKPYKYFATNCSATFGLEDDVVKKGAICTPKYSSPFPCTGGEVIFKALSPPYDTENPYSAKVQEQLKITNLRVQLLKRQSYPCQRNDLNEEPQHFTHYAIYDFIVKGSCFCNGHADQCIPVHGFRPVKAPGTFHMVHGKCMCKHNTAGSHCQHCAPLYNDRPWEAADGKTGAPNECRARKCNGHADTCHFDVNVWEASGSRSGGVCDDCQHNTEGQYCQRCKPGFYRDLRRPFSAPDACKPCSCHPVGSAVLPANSVTFCDPSNGDCPCKPGVAGRRCDRCMVGYWGFGDYGCRPCDCAGSCDPITGDCISSHTDIDWCHEVPDFRPVHNKSEPAWEWEDAQGFSALLHSGKCECKEQTLGK

SEQ ID NO: 335 - DNA, 1452 bp, Homo sapiens
  CDS (1)..(1452)
aaagcctgcaaccctcggatgggaaatttggctttggggcgaaaactctgggcagacaccacctgcggtcagaatgctaccgaactgtactgcttctacagtgagaacacggatctgacttgtcggcagcccaaatgtgacaagtgcaatgctgcctatcctcacctggctcacctgccatctgccatggcagactcatccttccggtttcctcgcacatggtggcagtctgcggaggatgtgcacagagaaaagatccagttagacctggaagctgaattctacttcactcacctaattgtgatgttcaagtcccccaggccggctgccatggtgctggaccgctcccaggactttgggaaaacatggaagccttataagtactttgcgactaactgctccgctacatttggcctggaagatgatgttgtcaagaagggcgctatttgtactcctaaatactccagtccttttccatgcactggaggagaggttattttcaaagctttgtcaccaccatacgatacagagaacccttacagtgccaaagttcaggagcagctgaagatcaccaaccttcgcgtgcagctgctgaaacgacagtcttatccctgtcagagaaatgacctgaacgaagagcctcaacattttacacactatgcgatctatgatttcattgtcaagggcagctgcttctgcaatggccacgccgatcaatgcatacctgttcatggcttcagacctgtcaaggccccaggaacattccacatggtccatgggaagtgtatgtgtaagcacaacacagcaggcagccactgccagcactgtgccccgttatacaatgaccggccatgggaggcagctgatggcaaaacgggggctcccaacgagtgcagaacctgcaagtgtaatgggcatgctgatacctgtcacttcgacgttaatgtgtgggaggcatcagggaatcgtagtggtggtgtctgtgatgactgtcagcacaacacagaaggacagtattgccagaggtgcaagccaggcttctatcgtgacctgcggagacccttctcagctccagatgcttgcaaaccgtgttcctgccatccagtaggatcagctgtccttcctgccaactcagtgaccttctgcgaccccagcaatggtgactgcccttgcaagcctggggtggcagggcgacgttgtgacaggtgcatggtgggatactggggcttcggagactatggctgtcgaccatgtgactgtgcggggagctgtgaccctatcaccggagactgcatcagcagccacacagacatagactggtatcatgaagttcctgacttccgtcccgtgcacaataagagcgaaccagcctgggagtgggaggatgcgcaggggttttctgcacttctacactcaggtaaatgcgaatgtaaggaacagacattaggaaag

SEQ ID NO: 336 - protein, 484 aa, Homo sapiens
KACNPRMGNLALGRKLWADTTCGQNATELYCFYSENTDLTCRQPKCDKCNAAYPHLAHLPSAMADSSFRFPRTWWQSAEDVHREKIQLDLEAEFYFTHLIVMFKSPRPAAMVLDRSQDFGKTWKPYKYFATNCSATFGLEDDVVKKGAICTPKYSSPFPCTGGEVIFKALSPPYDTENPYSAKVQEQLKITNLRVQLLKRQSYPCQRNDLNEEPQHFTHYAIYDFIVKGSCFCNGHADQCIPVHGFRPVKAPGTFHMVHGKCMCKHNTAGSHCQHCAPLYNDRPWEAADGKTGAPNECRTCKCNGHADTCHFDVNVWEASGNRSGGVCDDCQHNTEGQYCQRCKPGFYRDLRRPFSAPDACKPCSCHPVGSAVLPANSVTFCDPSNGDCPCKPGVAGRRCDRCMVGYWGFGDYGCRPCDCAGSCDPITGDCISSHTDIDWYHEVPDFRPVHNKSEPAWEWEDAQGFSALLHSGKCECKEQTLGK

SEQ ID NO: 337 - DNA, 1452 bp, Homo sapiens
  CDS (1)..(1452)
aaagcctgcaaccctcggatgggaaatttggctttggggcgaaaactctgggcagacaccacctgcggtcagaatgctaccgaactgtactgcttctacagtgagaacacggatctgacttgtcggcagcccaaatgtgacaagtgcaatgctgcctatcctcacctggctcacctgccatctgccatggcagactcatccttccggtttcctcgcacatggtggcagtctgcggaggatgtgcacagagaaaagatccagttagacctggaagctgaattctacttcactcacctaattgtgatgttcaagtcccccaggccggctgccatggtgctggaccgctcccaggactttgggaaaacatggaagccttataagtactttgcgactaactgctccgctacatttggcctggaagatgatgttgtcaagaagggcgctatttgtactcctaaatactccagtccttttccatgcactggaggagaggttattttcaaagctttgtcaccaccatacgatacagagaacccttacagtgccaaagttcaggagcagctgaagatcaccaaccttcgcgtgcagctgctgaaacgacagtcttatccctgtcagagaaatgacctgaacgaagagcctcaacattttacacactatgcgatctatgatttcattgtcaagggcagctgcttctgcaatggccacgccgatcaatgcatacctgttcatggcttcagacctgtcaaggccccaggaacattccacatggtccatgggaagtgtatgtgtaagcacaacacagcaggcagccactgccagcactgtgccccgttatacaatgaccggccatgggaggcagctgatggcaaaacgggggctcccaacgagtgcagaacctgcaagtgtaatgggcatgctgatacctgtcacttcgacgttaatgtgtgggaggcatcagggagtcgtagtggtggtgtctgtgatgactgtcagcacaacacagaaggacagtattgccagaggtgcaagccaggcttctatcgtgacctgcggagacccttctcagctccagatgcttgcaaaccgtgttcctgccatccagtaggatcagctgtccttcctgccaactcagtgaccttctgcgaccccagcaatggtgactgcccttgcaagcctggggtggcagggcgacgttgtgacaggtgcatggtgggatactggggcttcggagactatggctgtcgaccatgtgactgtgcggggagctgtgaccctatcaccggagactgcatcagcagccacacagacatagactggtgtcatgaagttcctgacttccgtcccgtgcacaataagagcgaaccagcctgggagtgggaggatgcgcaggggttttctgcacttctacactcaggtaaatgcgaatgtaaggaacagacattaggaaag

SEQ ID NO: 338 - protein, 484 aa, Homo sapiens
KACNPRMGNLALGRKLWADTTCGQNATELYCFYSENTDLTCRQPKCDKCNAAYPHLAHLPSAMADSSFRFPRTWWQSAEDVHREKIQLDLEAEFYFTHLIVMFKSPRPAAMVLDRSQDFGKTWKPYKYFATNCSATFGLEDDVVKKGAICTPKYSSPFPCTGGEVIFKALSPPYDTENPYSAKVQEQLKITNLRVQLLKRQSYPCQRNDLNEEPQHFTHYAIYDFIVKGSCFCNGHADQCIPVHGFRPVKAPGTFHMVHGKCMCKHNTAGSHCQHCAPLYNDRPWEAADGKTGAPNECRTCKCNGHADTCHFDVNVWEASGSRSGGVCDDCQHNTEGQYCQRCKPGFYRDLRRPFSAPDACKPCSCHPVGSAVLPANSVTFCDPSNGDCPCKPGVAGRRCDRCMVGYWGFGDYGCRPCDCAGSCDPITGDCISSHTDIDWCHEVPDFRPVHNKSEPAWEWEDAQGFSALLHSGKCECKEQTLGK

SEQ ID NO: 339 - DNA, 1452 bp, Homo sapiens
  CDS (1)..(1452)
aaagcctgcaaccctcggatgggaaatttggctttggggcgaaaactctgggcagacaccacctgcggtcagaatgctaccgaactgtactgcttctacagtgagaacacggatctgacttgtcggcagcccaaatgtgacaagtgcaatgctgcctatcctcacctggctcacctgccatctgccatggcagactcatccttccggtttcctcgcacatggtggcagtctgcggaggatgtgcacagagaaaagatccagttagacctggaagctgaattctacttcactcacctaattgtgatgttcaagtcccccaggccggctgccatggtgctggaccgctcccaggactttgggaaaacatggaagccttataagtactttgcgactaactgctccgctacatttggcctggaagatgatgttgtcaagaagggcgctatttgtactcctaaatactccagtccttttccatgcactggaggagaggttattttcaaagctttgtcaccaccatacgatacagagaacccttacagtgccaaagttcaggagcagctgaagatcaccaaccttcgcgtgcagctgctgaaacgacagtcttatccctgtcagagaaatgacctgaacgaagagcctcaacattttacacactatgcgatctatgatttcattgtcaagggcagctgcttctgcaatggccacgccgatcaatgcatacctgttcatggcttcagacctgtcaaggccccaggaacattccacatggtccatgggaagtgtatgtgtaagcacaacacagcaggcagccactgccagcactgtgccccgttatacaatgaccggccatgggaggcagctgatggcaaaacgggggctcccaacgagtgcagaacccgcaagtgtaatgggcatgctgatacctgtcacttcgacgttaatgtgtgggaggcatcagggaatcgtagtggtggtgtctgtgatgactgtcagcacaacacagaaggacagtattgccagaggtgcaagccaggcttctatcgtgacctgcggagacccttctcagctccagatgcttgcaaaccgtgttcctgccatccagtaggatcagctgtccttcctgccaactcagtgaccttctgcgaccccagcaatggtgactgcccttgcaagcctggggtggcagggcgacgttgtgacaggtgcatggtgggatactggggcttcggagactatggctgtcgaccatgtgactgtgcggggagctgtgaccctatcaccggagactgcatcagcagccacacagacatagactggtgtcatgaagttcctgacttccgtcccgtgcacaataagagcgaaccagcctgggagtgggaggatgcgcaggggttttctgcacttctacactcaggtaaatgcgaatgtaaggaacagacattaggaaag

SEQ ID NO: 340 - protein, 484 aa, Homo sapiens
KACNPRMGNLALGRKLWADTTCGQNATELYCFYSENTDLTCRQPKCDKCNAAYPHLAHLPSAMADSSFRFPRTWWQSAEDVHREKIQLDLEAEFYFTHLIVMFKSPRPAAMVLDRSQDFGKTWKPYKYFATNCSATFGLEDDVVKKGAICTPKYSSPFPCTGGEVIFKALSPPYDTENPYSAKVQEQLKITNLRVQLLKRQSYPCQRNDLNEEPQHFTHYAIYDFIVKGSCFCNGHADQCIPVHGFRPVKAPGTFHMVHGKCMCKHNTAGSHCQHCAPLYNDRPWEAADGKTGAPNECRTRKCNGHADTCHFDVNVWEASGNRSGGVCDDCQHNTEGQYCQRCKPGFYRDLRRPFSAPDACKPCSCHPVGSAVLPANSVTFCDPSNGDCPCKPGVAGRRCDRCMVGYWGFGDYGCRPCDCAGSCDPITGDCISSHTDIDWCHEVPDFRPVHNKSEPAWEWEDAQGFSALLHSGKCECKEQTLGK

SEQ ID NO: 341 - DNA, 1452 bp, Homo sapiens
  CDS (1)..(1452)
aaagcctgcaaccctcggatgggaaatttggctttggggcgaaaactctgggcagacaccacctgcggtcagaatgctaccgaactgtactgcttctacagtgagaacacggatctgacttgtcggcagcccaaatgtgacaagtgcaatgctgcctatcctcacctggctcacctgccatctgccatggcagactcatccttccggtttcctcgcacatggtggcagtctgcggaggatgtgcacagagaaaagatccagttagacctggaagctgaattctacttcactcacctaattgtgatgttcaagtcccccaggccggctgccatggtgctggaccgctcccaggactttgggaaaacatggaagccttataagtactttgcgactaactgctccgctacatttggcctggaagatgatgttgtcaagaagggcgctatttgtactcctaaatactccagtccttttccatgcactggaggagaggttattttcaaagctttgtcaccaccatacgatacagagaacccttacagtgccaaagttcaggagcagctgaagatcaccaaccttcgcgtgcagctgctgaaacgacagtcttatccctgtcagagaaatgacctgaacgaagagcctcaacattttacacactatgcgatctatgatttcattgtcaagggcagctgcttctgcaatggccacgccgatcaatgcatacctgttcatggcttcagacctgtcaaggccccaggaacattccacatggtccatgggaagtgtatgtgtaagcacaacacagcaggcagccactgccagcactgtgccccgttatacaatgaccggccatgggaggcagctgatggcaaaacgggggctcccaacgagtgcagagcctgcaagtgtaatgggcatgctgatacctgtcacttcgacgttaatgtgtgggaggcatcagggaatcgtagtggtggtgtctgtgatgactgtcagcacaacacagaaggacagtattgccagaggtgcaagccaggcttctatcgtgacctgcggagacccttctcagctccagatgcttgcaaaccgtgttcctgccatccagtaggatcagctgtccttcctgccaactcagtgaccttctgcgaccccagcaatggtgactgcccttgcaagcctggggtggcagggcgacgttgtgacaggtgcatggtgggatactggggcttcggagactatggctgtcgaccatgtgactgtgcggggagctgtgaccctatcaccggagactgcatcagcagccacacagacatagactggtatcatgaagttcctgacttccgtcccgtgcacaataagagcgaaccagcctgggagtgggaggatgcgcaggggttttctgcacttctacactcaggtaaatgcgaatgtaaggaacagacattaggaaag

SEQ ID NO: 342 - protein, 484 aa, Homo sapiens
KACNPRMGNLALGRKLWADTTCGQNATELYCFYSENTDLTCRQPKCDKCNAAYPHLAHLPSAMADSSFRFPRTWWQSAEDVHREKIQLDLEAEFYFTHLIVMFKSPRPAAMVLDRSQDFGKTWKPYKYFATNCSATFGLEDDVVKKGAICTPKYSSPFPCTGGEVIFKALSPPYDTENPYSAKVQEQLKITNLRVQLLKRQSYPCQRNDLNEEPQHFTHYAIYDFIVKGSCFCNGHADQCIPVHGFRPVKAPGTFHMVHGKCMCKHNTAGSHCQHCAPLYNDRPWEAADGKTGAPNECRACKCNGHADTCHFDVNVWEASGNRSGGVCDDCQHNTEGQYCQRCKPGFYRDLRRPFSAPDACKPCSCHPVGSAVLPANSVTFCDPSNGDCPCKPGVAGRRCDRCMVGYWGFGDYGCRPCDCAGSCDPITGDCISSHTDIDWYHEVPDFRPVHNKSEPAWEWEDAQGFSALLHSGKCECKEQTLGK

SEQ ID NO: 343 - DNA, 1452 bp, Homo sapiens
  CDS (1)..(1452)
aaagcctgcaaccctcggatgggaaatttggctttggggcgaaaactctgggcagacaccacctgcggtcagaatgctaccgaactgtactgcttctacagtgagaacacggatctgacttgtcggcagcccaaatgtgacaagtgcaatgctgcctatcctcacctggctcacctgccatctgccatggcagactcatccttccggtttcctcgcacatggtggcagtctgcggaggatgtgcacagagaaaagatccagttagacctggaagctgaattctacttcactcacctaattgtgatgttcaagtcccccaggccggctgccatggtgctggaccgctcccaggactttgggaaaacatggaagccttataagtactttgcgactaactgctccgctacatttggcctggaagatgatgttgtcaagaagggcgctatttgtactcctaaatactccagtccttttccatgcactggaggagaggttattttcaaagctttgtcaccaccatacgatacagagaacccttacagtgccaaagttcaggagcagctgaagatcaccaaccttcgcgtgcagctgctgaaacgacagtcttatccctgtcagagaaatgacctgaacgaagagcctcaacattttacacactatgcgatctatgatttcattgtcaagggcagctgcttctgcaatggccacgccgatcaatgcatacctgttcatggcttcagacctgtcaaggccccaggaacattccacatggtccatgggaagtgtatgtgtaagcacaacacagcaggcagccactgccagcactgtgccccgttatacaatgaccggccatgggaggcagctgatggcaaaacgggggctcccaacgagtgcagagcctgcaagtgtaatgggcatgctgatacctgtcacttcgacgttaatgtgtgggaggcatcagggagtcgtagtggtggtgtctgtgatgactgtcagcacaacacagaaggacagtattgccagaggtgcaagccaggcttctatcgtgacctgcggagacccttctcagctccagatgcttgcaaaccgtgttcctgccatccagtaggatcagctgtccttcctgccaactcagtgaccttctgcgaccccagcaatggtgactgcccttgcaagcctggggtggcagggcgacgttgtgacaggtgcatggtgggatactggggcttcggagactatggctgtcgaccatgtgactgtgcggggagctgtgaccctatcaccggagactgcatcagcagccacacagacatagactggtgtcatgaagttcctgacttccgtcccgtgcacaataagagcgaaccagcctgggagtgggaggatgcgcaggggttttctgcacttctacactcaggtaaatgcgaatgtaaggaacagacattaggaaag

SEQ ID NO: 344 - protein, 484 aa, Homo sapiens
KACNPRMGNLALGRKLWADTTCGQNATELYCFYSENTDLTCRQPKCDKCNAAYPHLAHLPSAMADSSFRFPRTWWQSAEDVHREKIQLDLEAEFYFTHLIVMFKSPRPAAMVLDRSQDFGKTWKPYKYFATNCSATFGLEDDVVKKGAICTPKYSSPFPCTGGEVIFKALSPPYDTENPYSAKVQEQLKITNLRVQLLKRQSYPCQRNDLNEEPQHFTHYAIYDFIVKGSCFCNGHADQCIPVHGFRPVKAPGTFHMVHGKCMCKHNTAGSHCQHCAPLYNDRPWEAADGKTGAPNECRACKCNGHADTCHFDVNVWEASGSRSGGVCDDCQHNTEGQYCQRCKPGFYRDLRRPFSAPDACKPCSCHPVGSAVLPANSVTFCDPSNGDCPCKPGVAGRRCDRCMVGYWGFGDYGCRPCDCAGSCDPITGDCISSHTDIDWCHEVPDFRPVHNKSEPAWEWEDAQGFSALLHSGKCECKEQTLGK

SEQ ID NO: 345 - DNA, 1452 bp, Homo sapiens
  CDS (1)..(1452)
aaagcctgcaaccctcggatgggaaatttggctttggggcgaaaactctgggcagacaccacctgcggtcagaatgctaccgaactgtactgcttctacagtgagaacacggatctgacttgtcggcagcccaaatgtgacaagtgcaatgctgcctatcctcacctggctcacctgccatctgccatggcagactcatccttccggtttcctcgcacatggtggcagtctgcggaggatgtgcacagagaaaagatccagttagacctggaagctgaattctacttcactcacctaattgtgatgttcaagtcccccaggccggctgccatggtgctggaccgctcccaggactttgggaaaacatggaagccttataagtactttgcgactaactgctccgctacatttggcctggaagatgatgttgtcaagaagggcgctatttgtactcctaaatactccagtccttttccatgcactggaggagaggttattttcaaagctttgtcaccaccatacgatacagagaacccttacagtgccaaagttcaggagcagctgaagatcaccaaccttcgcgtgcagctgctgaaacgacagtcttatccctgtcagagaaatgacctgaacgaagagcctcaacattttacacactatgcgatctatgatttcattgtcaagggcagctgcttctgcaatggccacgccgatcaatgcatacctgttcatggcttcagacctgtcaaggccccaggaacattccacatggtccatgggaagtgtatgtgtaagcacaacacagcaggcagccactgccagcactgtgccccgttatacaatgaccggccatgggaggcagctgatggcaaaacgggggctcccaacgagtgcagagcccgcaagtgtaatgggcatgctgatacctgtcacttcgacgttaatgtgtgggaggcatcagggaatcgtagtggtggtgtctgtgatgactgtcagcacaacacagaaggacagtattgccagaggtgcaagccaggcttctatcgtgacctgcggagacccttctcagctccagatgcttgcaaaccgtgttcctgccatccagtaggatcagctgtccttcctgccaactcagtgaccttctgcgaccccagcaatggtgactgcccttgcaagcctggggtggcagggcgacgttgtgacaggtgcatggtgggatactggggcttcggagactatggctgtcgaccatgtgactgtgcggggagctgtgaccctatcaccggagactgcatcagcagccacacagacatagactggtgtcatgaagttcctgacttccgtcccgtgcacaataagagcgaaccagcctgggagtgggaggatgcgcaggggttttctgcacttctacactcaggtaaatgcgaatgtaaggaacagacattaggaaag

SEQ ID NO: 346 - protein, 484 aa, Homo sapiens
KACNPRMGNLALGRKLWADTTCGQNATELYCFYSENTDLTCRQPKCDKCNAAYPHLAHLPSAMADSSFRFPRTWWQSAEDVHREKIQLDLEAEFYFTHLIVMFKSPRPAAMVLDRSQDFGKTWKPYKYFATNCSATFGLEDDVVKKGAICTPKYSSPFPCTGGEVIFKALSPPYDTENPYSAKVQEQLKITNLRVQLLKRQSYPCQRNDLNEEPQHFTHYAIYDFIVKGSCFCNGHADQCIPVHGFRPVKAPGTFHMVHGKCMCKHNTAGSHCQHCAPLYNDRPWEAADGKTGAPNECRARKCNGHADTCHFDVNVWEASGNRSGGVCDDCQHNTEGQYCQRCKPGFYRDLRRPFSAPDACKPCSCHPVGSAVLPANSVTFCDPSNGDCPCKPGVAGRRCDRCMVGYWGFGDYGCRPCDCAGSCDPITGDCISSHTDIDWCHEVPDFRPVHNKSEPAWEWEDAQGFSALLHSGKCECKEQTLGK

SEQ ID NO: 347 - DNA, 1452 bp, Homo sapiens
  CDS (1)..(1452)
aaagcctgcaaccctcggatgggaaatttggctttggggcgaaaactctgggcagacaccacctgcggtcagaatgctaccgaactgtactgcttctacagtgagaacacggatctgacttgtcggcagcccaaatgtgacaagtgcaatgctgcctatcctcacctggctcacctgccatctgccatggcagactcatccttccggtttcctcgcacatggtggcagtctgcggaggatgtgcacagagaaaagatccagttagacctggaagctgaattctacttcactcacctaattgtgatgttcaagtcccccaggccggctgccatggtgctggaccgctcccaggactttgggaaaacatggaagccttataagtactttgcgactaactgctccgctacatttggcctggaagatgatgttgtcaagaagggcgctatttgtactcctaaatactccagtccttttccatgcactggaggagaggttattttcaaagctttgtcaccaccatacgatacagagaacccttacagtgccaaagttcaggagcagctgaagatcaccaaccttcgcgtgcagctgctgaaacgacagtcttatccctgtcagagaaatgacctgaacgaagagcctcaacattttacacactatgcgatctatgatttcattgtcaagggcagctgcttctgcaatggccacgccgatcaatgcatacctgttcatggcttcagacctgtcaaggccccaggaacattccacatggtccatgggaagtgtatgtgtaagcacaacacagcaggcagccactgccagcactgtgccccgttatacaatgaccggccatgggaggcagctgatggcaaaacgggggctcccaacgagtgcagaacctgcaagtgtaatgggcatgctgatacctgtcacttcgacgttaatgtgtgggaggcatcagggaatcgtagtggtggtgtctgtgatgactgtcagcacaacacagaaggacagtattgccagaggtgcaagccaggcttctatcgtgacctgcggagacccttctcagctccagatgcttgcaaaccgtgttcctgccatccagtaggatcagctgtccttcctgccaactcagtgaccttctgcgaccccagcaatggtgactgcccttgcaagcctggggtggcagggcgacgttgtgacaggtgcatggtgggatactggggcttcggagactatggctgtcgaccatgtgactgtgcggggagctgtgaccctatcaccggagactgcatcagcagccacacagacatagactggtgtcatgaagttcctgacttccgtcccgtgcacaataagagcgaaccagcctgggagtgggaggatgcgcaggggttttctgcacttctacactcaggtaaatgcgaatgtaaggaacagacattaggaaag

SEQ ID NO: 348 - protein, 484 aa, Homo sapiens
KACNPRMGNLALGRKLWADTTCGQNATELYCFYSENTDLTCRQPKCDKCNAAYPHLAHLPSAMADSSFRFPRTWWQSAEDVHREKIQLDLEAEFYFTHLIVMFKSPRPAAMVLDRSQDFGKTWKPYKYFATNCSATFGLEDDVVKKGAICTPKYSSPFPCTGGEVIFKALSPPYDTENPYSAKVQEQLKITNLRVQLLKRQSYPCQRNDLNEEPQHFTHYAIYDFIVKGSCFCNGHADQCIPVHGFRPVKAPGTFHMVHGKCMCKHNTAGSHCQHCAPLYNDRPWEAADGKTGAPNECRTCKCNGHADTCHFDVNVWEASGNRSGGVCDDCQHNTEGQYCQRCKPGFYRDLRRPFSAPDACKPCSCHPVGSAVLPANSVTFCDPSNGDCPCKPGVAGRRCDRCMVGYWGFGDYGCRPCDCAGSCDPITGDCISSHTDIDWCHEVPDFRPVHNKSEPAWEWEDAQGFSALLHSGKCECKEQTLGK

SEQ ID NO: 349 - DNA, 1452 bp, Homo sapiens
  CDS (1)..(1452)
aaagcctgcaaccctcggatgggaaatttggctttggggcgaaaactctgggcagacaccacctgcggtcagaatgctaccgaactgtactgcttctacagtgagaacacggatctgacttgtcggcagcccaaatgtgacaagtgcaatgctgcctatcctcacctggctcacctgccatctgccatggcagactcatccttccggtttcctcgcacatggtggcagtctgcggaggatgtgcacagagaaaagatccagttagacctggaagctgaattctacttcactcacctaattgtgatgttcaagtcccccaggccggctgccatggtgctggaccgctcccaggactttgggaaaacatggaagccttataagtactttgcgactaactgctccgctacatttggcctggaagatgatgttgtcaagaagggcgctatttgtactcctaaatactccagtccttttccatgcactggaggagaggttattttcaaagctttgtcaccaccatacgatacagagaacccttacagtgccaaagttcaggagcagctgaagatcaccaaccttcgcgtgcagctgctgaaacgacagtcttatccctgtcagagaaatgacctgaacgaagagcctcaacattttacacactatgcgatctatgatttcattgtcaagggcagctgcttctgcaatggccacgccgatcaatgcatacctgttcatggcttcagacctgtcaaggccccaggaacattccacatggtccatgggaagtgtatgtgtaagcacaacacagcaggcagccactgccagcactgtgccccgttatacaatgaccggccatgggaggcagctgatggcaaaacgggggctcccaacgagtgcagagcctgcaagtgtaatgggcatgctgatacctgtcacttcgacgttaatgtgtgggaggcatcagggaatcgtagtggtggtgtctgtgatgactgtcagcacaacacagaaggacagtattgccagaggtgcaagccaggcttctatcgtgacctgcggagacccttctcagctccagatgcttgcaaaccgtgttcctgccatccagtaggatcagctgtccttcctgccaactcagtgaccttctgcgaccccagcaatggtgactgcccttgcaagcctggggtggcagggcgacgttgtgacaggtgcatggtgggatactggggcttcggagactatggctgtcgaccatgtgactgtgcggggagctgtgaccctatcaccggagactgcatcagcagccacacagacatagactggtgtcatgaagttcctgacttccgtcccgtgcacaataagagcgaaccagcctgggagtgggaggatgcgcaggggttttctgcacttctacactcaggtaaatgcgaatgtaaggaacagacattaggaaag

SEQ ID NO: 350 - protein, 484 aa, Homo sapiens
KACNPRMGNLALGRKLWADTTCGQNATELYCFYSENTDLTCRQPKCDKCNAAYPHLAHLPSAMADSSFRFPRTWWQSAEDVHREKIQLDLEAEFYFTHLIVMFKSPRPAAMVLDRSQDFGKTWKPYKYFATNCSATFGLEDDVVKKGAICTPKYSSPFPCTGGEVIFKALSPPYDTENPYSAKVQEQLKITNLRVQLLKRQSYPCQRNDLNEEPQHFTHYAIYDFIVKGSCFCNGHADQCIPVHGFRPVKAPGTFHMVHGKCMCKHNTAGSHCQHCAPLYNDRPWEAADGKTGAPNECRACKCNGHADTCHFDVNVWEASGNRSGGVCDDCQHNTEGQYCQRCKPGFYRDLRRPFSAPDACKPCSCHPVGSAVLPANSVTFCDPSNGDCPCKPGVAGRRCDRCMVGYWGFGDYGCRPCDCAGSCDPITGDCISSHTDIDWCHEVPDFRPVHNKSEPAWEWEDAQGFSALLHSGKCECKEQTLGK

SEQ ID NO: 351 - DNA, 1452 bp, Homo sapiens
  CDS (1)..(1452)
aaagcctgcaaccctcggatgggaaatttggctttggggcgaaaactctgggcagacaccacctgcggtcagaatgctaccgaactgtactgcttctacagtgagaacaaggatctgacttgtcggcagcccaaatgtgacaagtgcaatgctgcctatcctcacctggctcacctgccatctgccatggcagactcatccttccggtttcctcgcacatggtggcagtctgcggaggatgtgcacagagaaaagatccagttagacctggaagctgaattctacttcactcacctaattgtgatgttcaagtcccccaggccggctgccatggtgctggaccgctcccaggactttgggaaaacatggaagccttataagtactttgcgactaactgctccgctacatttggcctggaagatgatgttgtcaagaagggcgctatttgtacttctaaatactccagtccttttccatgcactggaggagaggttattttcaaagctttgtcaccaccacacgatacagagaacccttacagtgccaaagttcaggagcagctgaagatcaccaaccttcgcgtgcagctgctgaaacgacagtcttgtccctgtcagagaaatgacctgaacgaagagcctcaacattttacacactatgcgatctatgatttcattgtcaagggcagctgcttctgcaatggccacgccgatcaatgcatacctgttcatggcttcagacctgtcaaggccccaggaacattccacatggtccatgggaagtgtatgtgtaagcacaacacagcaggcagccactgccagcactgtgccccgttatacaatgaccggccatgggaggcagctgatggcaaaacgggggctcccaacgagtgcagaacctgcaagtgtaatgggcatgctgatacctgtcacttcgacgttaatgtgtgggaggcatcagggaatcgtagtggtggtgtctgtgatgactgtcagcacaacacagaaggacagtattgccagaggtgcaagccaggcttctatcgtgacctgcggagacccttctcagctccagatgcttgcaaaccgtgttcctgccatccagtaggatcagctgtccttcctgccaactcagtgaccttctgcgaccccagcaatggtgactgcccttgcaagcctggggtggcagggcgacgttgtgacaggtgcatggtgggatactggggcttcggagactatggctgtcgaccatgtgactgtgcggggagctgtgaccctatcaccggagactgcatcagcagccacacagacatagactggtgtcatgaagttcctgacttccgtcccgtgcacaataagagcgaaccagcctgggagtgggaggatgcgcaggggttttctgcacttctacactcaggtaaatgcgaatgtaaggaacagacattaggaaat

SEQ ID NO: 352 - protein, 484 aa, Homo sapiens
KACNPRMGNLALGRKLWADTTCGQNATELYCFYSENKDLTCRQPKCDKCNAAYPHLAHLPSAMADSSFRFPRTWWQSAEDVHREKIQLDLEAEFYFTHLIVMFKSPRPAAMVLDRSQDFGKTWKPYKYFATNCSATFGLEDDVVKKGAICTSKYSSPFPCTGGEVIFKALSPPHDTENPYSAKVQEQLKITNLRVQLLKRQSCPCQRNDLNEEPQHFTHYAIYDFIVKGSCFCNGHADQCIPVHGFRPVKAPGTFHMVHGKCMCKHNTAGSHCQHCAPLYNDRPWEAADGKTGAPNECRTCKCNGHADTCHFDVNVWEASGNRSGGVCDDCQHNTEGQYCQRCKPGFYRDLRRPFSAPDACKPCSCHPVGSAVLPANSVTFCDPSNGDCPCKPGVAGRRCDRCMVGYWGFGDYGCRPCDCAGSCDPITGDCISSHTDIDWCHEVPDFRPVHNKSEPAWEWEDAQGFSALLHSGKCECKEQTLGN

SEQ ID NO: 353 - DNA, 1452 bp, Homo sapiens
  CDS (1)..(1452)
aaagcctgcaaccctcggatgggaaatttggctttggggcgaaaactctgggcagacaccacctgcggtcagaatgctaccgaactgtactgcttctacagtgagaacaaggatctgacttgtcggcagcccaaatgtgacaagtgcaatgctgcctatcctcacctggctcacctgccatctgccatggcagactcatccttccggtttcctcgcacatggtggcagtctgcggaggatgtgcacagagaaaagatccagttagacctggaagctgaattctacttcactcacctaattgtgatgttcaagtcccccaggccggctgccatggtgctggaccgctcccaggactttgggaaaacatggaagccttataagtactttgcgactaactgctccgctacatttggcctggaagatgatgttgtcaagaagggcgctatttgtacttctaaatactccagtccttttccatgcactggaggagaggttattttcaaagctttgtcaccaccacacgatacagagaacccttacagtgccaaagttcaggagcagctgaagatcaccaaccttcgcgtgcagctgctgaaacgacagtcttgtccctgtcagagaaatgacctgaacgaagagcctcaacattttacacactatgcgatctatgatttcattgtcaagggcagctgcttctgcaatggccacgccgatcaatgcatacctgttcatggcttcagacctgtcaaggccccaggaacattccacatggtccatgggaagtgtatgtgtaagcacaacacagcaggcagccactgccagcactgtgccccgttatacaatgaccggccatgggaggcagctgatggcaaaacgggggctcccaacgagtgcagagcccgcaagtgtaatgggcatgctgatacctgtcacttcgacgttaatgtgtgggaggcatcagggaatcgtagtggtggtgtctgtgatgactgtcagcacaacacagaaggacagtattgccagaggtgcaagccaggcttctatcgtgacctgcggagacccttctcagctccagatgcttgcaaaccgtgttcctgccatccagtaggatcagctgtccttcctgccaactcagtgaccttctgcgaccccagcaatggtgactgcccttgcaagcctggggtggcagggcgacgttgtgacaggtgcatggtgggatactggggcttcggagactatggctgtcgaccatgtgactgtgcggggagctgtgaccctatcaccggagactgcatcagcagccacacagacatagactggtgtcatgaagttcctgacttccgtcccgtgcacaataagagcgaaccagcctgggagtgggaggatgcgcaggggttttctgcacttctacactcaggtaaatgcgaatgtaaggaacagacattaggaaat

SEQ ID NO: 354 - protein, 484 aa, Homo sapiens
KACNPRMGNLALGRKLWADTTCGQNATELYCFYSENKDLTCRQPKCDKCNAAYPHLAHLPSAMADSSFRFPRTWWQSAEDVHREKIQLDLEAEFYFTHLIVMFKSPRPAAMVLDRSQDFGKTWKPYKYFATNCSATFGLEDDVVKKGAICTSKYSSPFPCTGGEVIFKALSPPHDTENPYSAKVQEQLKITNLRVQLLKRQSCPCQRNDLNEEPQHFTHYAIYDFIVKGSCFCNGHADQCIPVHGFRPVKAPGTFHMVHGKCMCKHNTAGSHCQHCAPLYNDRPWEAADGKTGAPNECRARKCNGHADTCHFDVNVWEASGNRSGGVCDDCQHNTEGQYCQRCKPGFYRDLRRPFSAPDACKPCSCHPVGSAVLPANSVTFCDPSNGDCPCKPGVAGRRCDRCMVGYWGFGDYGCRPCDCAGSCDPITGDCISSHTDIDWCHEVPDFRPVHNKSEPAWEWEDAQGFSALLHSGKCECKEQTLGN

SEQ ID NO: 355 - DNA, 1452 bp, Homo sapiens
  CDS (1)..(1452)
aaagcctgcaaccctcggatgggaaatttggctttggggcgaaaactctgggcagacaccacctgcggtcagaatgctaccgaactgtactgcttctacagtgagaacaaggatctgacttgtcggcagcccaaatgtgacaagtgcaatgctgcctatcctcacctggctcacctgccatctgccatggcagactcatccttccggtttcctcgcacatggtggcagtctgcggaggatgtgcacagagaaaagatccagttagacctggaagctgaattctacttcactcacctaattgtgatgttcaagtcccccaggccggctgccatggtgctggaccgctcccaggactttgggaaaacatggaagccttataagtactttgcgactaactgctccgctacatttggcctggaagatgatgttgtcaagaagggcgctatttgtacttctaaatactccagtccttttccatgcactggaggagaggttattttcaaagctttgtcaccaccacacgatacagagaacccttacagtgccaaagttcaggagcagctgaagatcaccaaccttcgcgtgcagctgctgaaacgacagtcttgtccctgtcagagaaatgacctgaacgaagagcctcaacattttacacactatgcgatctatgatttcattgtcaagggcagctgcttctgcaatggccacgccgatcaatgcatacctgttcatggcttcagacctgtcaaggccccaggaacattccacatggtccatgggaagtgtatgtgtaagcacaacacagcaggcagccactgccagcactgtgccccgttatacaatgaccggccatgggaggcagctgatggcaaaacgggggctcccaacgagtgcagagcctgcaagtgtaatgggcatgctgatacctgtcacttcgacgttaatgtgtgggaggcatcagggagtcgtagtggtggtgtctgtgatgactgtcagcacaacacagaaggacagtattgccagaggtgcaagccaggcttctatcgtgacctgcggagacccttctcagctccagatgcttgcaaaccgtgttcctgccatccagtaggatcagctgtccttcctgccaactcagtgaccttctgcgaccccagcaatggtgactgcccttgcaagcctggggtggcagggcgacgttgtgacaggtgcatggtgggatactggggcttcggagactatggctgtcgaccatgtgactgtgcggggagctgtgaccctatcaccggagactgcatcagcagccacacagacatagactggtgtcatgaagttcctgacttccgtcccgtgcacaataagagcgaaccagcctgggagtgggaggatgcgcaggggttttctgcacttctacactcaggtaaatgcgaatgtaaggaacagacattaggaaat

SEQ ID NO: 356 - protein, 484 aa, Homo sapiens
KACNPRMGNLALGRKLWADTTCGQNATELYCFYSENKDLTCRQPKCDKCNAAYPHLAHLPSAMADSSFRFPRTWWQSAEDVHREKIQLDLEAEFYFTHLIVMFKSPRPAAMVLDRSQDFGKTWKPYKYFATNCSATFGLEDDVVKKGAICTSKYSSPFPCTGGEVIFKALSPPHDTENPYSAKVQEQLKITNLRVQLLKRQSCPCQRNDLNEEPQHFTHYAIYDFIVKGSCFCNGHADQCIPVHGFRPVKAPGTFHMVHGKCMCKHNTAGSHCQHCAPLYNDRPWEAADGKTGAPNECRACKCNGHADTCHFDVNVWEASGSRSGGVCDDCQHNTEGQYCQRCKPGFYRDLRRPFSAPDACKPCSCHPVGSAVLPANSVTFCDPSNGDCPCKPGVAGRRCDRCMVGYWGFGDYGCRPCDCAGSCDPITGDCISSHTDIDWCHEVPDFRPVHNKSEPAWEWEDAQGFSALLHSGKCECKEQTLGN

SEQ ID NO: 357 - DNA, 1452 bp, Homo sapiens
  CDS (1)..(1452)
aaagcctgcaaccctcggatgggaaatttggctttggggcgaaaactctgggcagacaccacctgcggtcagaatgctaccgaactgtactgcttctacagtgagaacaaggatctgacttgtcggcagcccaaatgtgacaagtgcaatgctgcctatcctcacctggctcacctgccatctgccatggcagactcatccttccggtttcctcgcacatggtggcagtctgcggaggatgtgcacagagaaaagatccagttagacctggaagctgaattctacttcactcacctaattgtgatgttcaagtcccccaggccggctgccatggtgctggaccgctcccaggactttgggaaaacatggaagccttataagtactttgcgactaactgctccgctacatttggcctggaagatgatgttgtcaagaagggcgctatttgtacttctaaatactccagtccttttccatgcactggaggagaggttattttcaaagctttgtcaccaccacacgatacagagaacccttacagtgccaaagttcaggagcagctgaagatcaccaaccttcgcgtgcagctgctgaaacgacagtcttgtccctgtcagagaaatgacctgaacgaagagcctcaacattttacacactatgcgatctatgatttcattgtcaagggcagctgcttctgcaatggccacgccgatcaatgcatacctgttcatggcttcagacctgtcaaggccccaggaacattccacatggtccatgggaagtgtatgtgtaagcacaacacagcaggcagccactgccagcactgtgccccgttatacaatgaccggccatgggaggcagctgatggcaaaacgggggctcccaacgagtgcagagcctgcaagtgtaatgggcatgctgatacctgtcacttcgacgttaatgtgtgggaggcatcagggaatcgtagtggtggtgtctgtgatgactgtcagcacaacacagaaggacagtattgccagaggtgcaagccaggcttctatcgtgacctgcggagacccttctcagctccagatgcttgcaaaccgtgttcctgccatccagtaggatcagctgtccttcctgccaactcagtgaccttctgcgaccccagcaatggtgactgcccttgcaagcctggggtggcagggcgacgttgtgacaggtgcatggtgggatactggggcttcggagactatggctgtcgaccatgtgactgtgcggggagctgtgaccctatcaccggagactgcatcagcagccacacagacatagactggtatcatgaagttcctgacttccgtcccgtgcacaataagagcgaaccagcctgggagtgggaggatgcgcaggggttttctgcacttctacactcaggtaaatgcgaatgtaaggaacagacattaggaaat

SEQ ID NO: 358 - protein, 484 aa, Homo sapiens
KACNPRMGNLALGRKLWADTTCGQNATELYCFYSENKDLTCRQPKCDKCNAAYPHLAHLPSAMADSSFRFPRTWWQSAEDVHREKIQLDLEAEFYFTHLIVMFKSPRPAAMVLDRSQDFGKTWKPYKYFATNCSATFGLEDDVVKKGAICTSKYSSPFPCTGGEVIFKALSPPHDTENPYSAKVQEQLKITNLRVQLLKRQSCPCQRNDLNEEPQHFTHYAIYDFIVKGSCFCNGHADQCIPVHGFRPVKAPGTFHMVHGKCMCKHNTAGSHCQHCAPLYNDRPWEAADGKTGAPNECRACKCNGHADTCHFDVNVWEASGNRSGGVCDDCQHNTEGQYCQRCKPGFYRDLRRPFSAPDACKPCSCHPVGSAVLPANSVTFCDPSNGDCPCKPGVAGRRCDRCMVGYWGFGDYGCRPCDCAGSCDPITGDCISSHTDIDWYHEVPDFRPVHNKSEPAWEWEDAQGFSALLHSGKCECKEQTLGN

SEQ ID NO: 359 - DNA, 1452 bp, Homo sapiens
  CDS (1)..(1452)
aaagcctgcaaccctcggatgggaaatttggctttggggcgaaaactctgggcagacaccacctgcggtcagaatgctaccgaactgtactgcttctacagtgagaacaaggatctgacttgtcggcagcccaaatgtgacaagtgcaatgctgcctatcctcacctggctcacctgccatctgccatggcagactcatccttccggtttcctcgcacatggtggcagtctgcggaggatgtgcacagagaaaagatccagttagacctggaagctgaattctacttcactcacctaattgtgatgttcaagtcccccaggccggctgccatggtgctggaccgctcccaggactttgggaaaacatggaagccttataagtactttgcgactaactgctccgctacatttggcctggaagatgatgttgtcaagaagggcgctatttgtacttctaaatactccagtccttttccatgcactggaggagaggttattttcaaagctttgtcaccaccacacgatacagagaacccttacagtgccaaagttcaggagcagctgaagatcaccaaccttcgcgtgcagctgctgaaacgacagtcttgtccctgtcagagaaatgacctgaacgaagagcctcaacattttacacactatgcgatctatgatttcattgtcaagggcagctgcttctgcaatggccacgccgatcaatgcatacctgttcatggcttcagacctgtcaaggccccaggaacattccacatggtccatgggaagtgtatgtgtaagcacaacacagcaggcagccactgccagcactgtgccccgttatacaatgaccggccatgggaggcagctgatggcaaaacgggggctcccaacgagtgcagaacccgcaagtgtaatgggcatgctgatacctgtcacttcgacgttaatgtgtgggaggcatcagggaatcgtagtggtggtgtctgtgatgactgtcagcacaacacagaaggacagtattgccagaggtgcaagccaggcttctatcgtgacctgcggagacccttctcagctccagatgcttgcaaaccgtgttcctgccatccagtaggatcagctgtccttcctgccaactcagtgaccttctgcgaccccagcaatggtgactgcccttgcaagcctggggtggcagggcgacgttgtgacaggtgcatggtgggatactggggcttcggagactatggctgtcgaccatgtgactgtgcggggagctgtgaccctatcaccggagactgcatcagcagccacacagacatagactggtgtcatgaagttcctgacttccgtcccgtgcacaataagagcgaaccagcctgggagtgggaggatgcgcaggggttttctgcacttctacactcaggtaaatgcgaatgtaaggaacagacattaggaaat

SEQ ID NO: 360 - protein, 484 aa, Homo sapiens
KACNPRMGNLALGRKLWADTTCGQNATELYCFYSENKDLTCRQPKCDKCNAAYPHLAHLPSAMADSSFRFPRTWWQSAEDVHREKIQLDLEAEFYFTHLIVMFKSPRPAAMVLDRSQDFGKTWKPYKYFATNCSATFGLEDDVVKKGAICTSKYSSPFPCTGGEVIFKALSPPHDTENPYSAKVQEQLKITNLRVQLLKRQSCPCQRNDLNEEPQHFTHYAIYDFIVKGSCFCNGHADQCIPVHGFRPVKAPGTFHMVHGKCMCKHNTAGSHCQHCAPLYNDRPWEAADGKTGAPNECRTRKCNGHADTCHFDVNVWEASGNRSGGVCDDCQHNTEGQYCQRCKPGFYRDLRRPFSAPDACKPCSCHPVGSAVLPANSVTFCDPSNGDCPCKPGVAGRRCDRCMVGYWGFGDYGCRPCDCAGSCDPITGDCISSHTDIDWCHEVPDFRPVHNKSEPAWEWEDAQGFSALLHSGKCECKEQTLGN

SEQ ID NO: 361 - DNA, 1452 bp, Homo sapiens
  CDS (1)..(1452)
aaagcctgcaaccctcggatgggaaatttggctttggggcgaaaactctgggcagacaccacctgcggtcagaatgctaccgaactgtactgcttctacagtgagaacaaggatctgacttgtcggcagcccaaatgtgacaagtgcaatgctgcctatcctcacctggctcacctgccatctgccatggcagactcatccttccggtttcctcgcacatggtggcagtctgcggaggatgtgcacagagaaaagatccagttagacctggaagctgaattctacttcactcacctaattgtgatgttcaagtcccccaggccggctgccatggtgctggaccgctcccaggactttgggaaaacatggaagccttataagtactttgcgactaactgctccgctacatttggcctggaagatgatgttgtcaagaagggcgctatttgtacttctaaatactccagtccttttccatgcactggaggagaggttattttcaaagctttgtcaccaccacacgatacagagaacccttacagtgccaaagttcaggagcagctgaagatcaccaaccttcgcgtgcagctgctgaaacgacagtcttgtccctgtcagagaaatgacctgaacgaagagcctcaacattttacacactatgcgatctatgatttcattgtcaagggcagctgcttctgcaatggccacgccgatcaatgcatacctgttcatggcttcagacctgtcaaggccccaggaacattccacatggtccatgggaagtgtatgtgtaagcacaacacagcaggcagccactgccagcactgtgccccgttatacaatgaccggccatgggaggcagctgatggcaaaacgggggctcccaacgagtgcagaacctgcaagtgtaatgggcatgctgatacctgtcacttcgacgttaatgtgtgggaggcatcagggagtcgtagtggtggtgtctgtgatgactgtcagcacaacacagaaggacagtattgccagaggtgcaagccaggcttctatcgtgacctgcggagacccttctcagctccagatgcttgcaaaccgtgttcctgccatccagtaggatcagctgtccttcctgccaactcagtgaccttctgcgaccccagcaatggtgactgcccttgcaagcctggggtggcagggcgacgttgtgacaggtgcatggtgggatactggggcttcggagactatggctgtcgaccatgtgactgtgcggggagctgtgaccctatcaccggagactgcatcagcagccacacagacatagactggtgtcatgaagttcctgacttccgtcccgtgcacaataagagcgaaccagcctgggagtgggaggatgcgcaggggttttctgcacttctacactcaggtaaatgcgaatgtaaggaacagacattaggaaat

SEQ ID NO: 362 - protein, 484 aa, Homo sapiens
KACNPRMGNLALGRKLWADTTCGQNATELYCFYSENKDLTCRQPKCDKCNAAYPHLAHLPSAMADSSFRFPRTWWQSAEDVHREKIQLDLEAEFYFTHLIVMFKSPRPAAMVLDRSQDFGKTWKPYKYFATNCSATFGLEDDVVKKGAICTSKYSSPFPCTGGEVIFKALSPPHDTENPYSAKVQEQLKITNLRVQLLKRQSCPCQRNDLNEEPQHFTHYAIYDFIVKGSCFCNGHADQCIPVHGFRPVKAPGTFHMVHGKCMCKHNTAGSHCQHCAPLYNDRPWEAADGKTGAPNECRTCKCNGHADTCHFDVNVWEASGSRSGGVCDDCQHNTEGQYCQRCKPGFYRDLRRPFSAPDACKPCSCHPVGSAVLPANSVTFCDPSNGDCPCKPGVAGRRCDRCMVGYWGFGDYGCRPCDCAGSCDPITGDCISSHTDIDWCHEVPDFRPVHNKSEPAWEWEDAQGFSALLHSGKCECKEQTLGN

SEQ ID NO: 363 - DNA, 1452 bp, Homo sapiens
  CDS (1)..(1452)
aaagcctgcaaccctcggatgggaaatttggctttggggcgaaaactctgggcagacaccacctgcggtcagaatgctaccgaactgtactgcttctacagtgagaacaaggatctgacttgtcggcagcccaaatgtgacaagtgcaatgctgcctatcctcacctggctcacctgccatctgccatggcagactcatccttccggtttcctcgcacatggtggcagtctgcggaggatgtgcacagagaaaagatccagttagacctggaagctgaattctacttcactcacctaattgtgatgttcaagtcccccaggccggctgccatggtgctggaccgctcccaggactttgggaaaacatggaagccttataagtactttgcgactaactgctccgctacatttggcctggaagatgatgttgtcaagaagggcgctatttgtacttctaaatactccagtccttttccatgcactggaggagaggttattttcaaagctttgtcaccaccacacgatacagagaacccttacagtgccaaagttcaggagcagctgaagatcaccaaccttcgcgtgcagctgctgaaacgacagtcttgtccctgtcagagaaatgacctgaacgaagagcctcaacattttacacactatgcgatctatgatttcattgtcaagggcagctgcttctgcaatggccacgccgatcaatgcatacctgttcatggcttcagacctgtcaaggccccaggaacattccacatggtccatgggaagtgtatgtgtaagcacaacacagcaggcagccactgccagcactgtgccccgttatacaatgaccggccatgggaggcagctgatggcaaaacgggggctcccaacgagtgcagaacctgcaagtgtaatgggcatgctgatacctgtcacttcgacgttaatgtgtgggaggcatcagggaatcgtagtggtggtgtctgtgatgactgtcagcacaacacagaaggacagtattgccagaggtgcaagccaggcttctatcgtgacctgcggagacccttctcagctccagatgcttgcaaaccgtgttcctgccatccagtaggatcagctgtccttcctgccaactcagtgaccttctgcgaccccagcaatggtgactgcccttgcaagcctggggtggcagggcgacgttgtgacaggtgcatggtgggatactggggcttcggagactatggctgtcgaccatgtgactgtgcggggagctgtgaccctatcaccggagactgcatcagcagccacacagacatagactggtatcatgaagttcctgacttccgtcccgtgcacaataagagcgaaccagcctgggagtgggaggatgcgcaggggttttctgcacttctacactcaggtaaatgcgaatgtaaggaacagacattaggaaat

SEQ ID NO: 364 - protein, 484 aa, Homo sapiens
KACNPRMGNLALGRKLWADTTCGQNATELYCFYSENKDLTCRQPKCDKCNAAYPHLAHLPSAMADSSFRFPRTWWQSAEDVHREKIQLDLEAEFYFTHLIVMFKSPRPAAMVLDRSQDFGKTWKPYKYFATNCSATFGLEDDVVKKGAICTSKYSSPFPCTGGEVIFKALSPPHDTENPYSAKVQEQLKITNLRVQLLKRQSCPCQRNDLNEEPQHFTHYAIYDFIVKGSCFCNGHADQCIPVHGFRPVKAPGTFHMVHGKCMCKHNTAGSHCQHCAPLYNDRPWEAADGKTGAPNECRTCKCNGHADTCHFDVNVWEASGNRSGGVCDDCQHNTEGQYCQRCKPGFYRDLRRPFSAPDACKPCSCHPVGSAVLPANSVTFCDPSNGDCPCKPGVAGRRCDRCMVGYWGFGDYGCRPCDCAGSCDPITGDCISSHTDIDWYHEVPDFRPVHNKSEPAWEWEDAQGFSALLHSGKCECKEQTLGN

SEQ ID NO: 365 - DNA, 1452 bp, Homo sapiens
  CDS (1)..(1452)
aaagcctgcaaccctcggatgggaaatttggctttggggcgaaaactctgggcagacaccacctgcggtcagaatgctaccgaactgtactgcttctacagtgagaacaaggatctgacttgtcggcagcccaaatgtgacaagtgcaatgctgcctatcctcacctggctcacctgccatctgccatggcagactcatccttccggtttcctcgcacatggtggcagtctgcggaggatgtgcacagagaaaagatccagttagacctggaagctgaattctacttcactcacctaattgtgatgttcaagtcccccaggccggctgccatggtgctggaccgctcccaggactttgggaaaacatggaagccttataagtactttgcgactaactgctccgctacatttggcctggaagatgatgttgtcaagaagggcgctatttgtacttctaaatactccagtccttttccatgcactggaggagaggttattttcaaagctttgtcaccaccacacgatacagagaacccttacagtgccaaagttcaggagcagctgaagatcaccaaccttcgcgtgcagctgctgaaacgacagtcttgtccctgtcagagaaatgacctgaacgaagagcctcaacattttacacactatgcgatctatgatttcattgtcaagggcagctgcttctgcaatggccacgccgatcaatgcatacctgttcatggcttcagacctgtcaaggccccaggaacattccacatggtccatgggaagtgtatgtgtaagcacaacacagcaggcagccactgccagcactgtgccccgttatacaatgaccggccatgggaggcagctgatggcaaaacgggggctcccaacgagtgcagaacccgcaagtgtaatgggcatgctgatacctgtcacttcgacgttaatgtgtgggaggcatcagggagtcgtagtggtggtgtctgtgatgactgtcagcacaacacagaaggacagtattgccagaggtgcaagccaggcttctatcgtgacctgcggagacccttctcagctccagatgcttgcaaaccgtgttcctgccatccagtaggatcagctgtccttcctgccaactcagtgaccttctgcgaccccagcaatggtgactgcccttgcaagcctggggtggcagggcgacgttgtgacaggtgcatggtgggatactggggcttcggagactatggctgtcgaccatgtgactgtgcggggagctgtgaccctatcaccggagactgcatcagcagccacacagacatagactggtgtcatgaagttcctgacttccgtcccgtgcacaataagagcgaaccagcctgggagtgggaggatgcgcaggggttttctgcacttctacactcaggtaaatgcgaatgtaaggaacagacattaggaaat

SEQ ID NO: 366 - protein, 484 aa, Homo sapiens
KACNPRMGNLALGRKLWADTTCGQNATELYCFYSENKDLTCRQPKCDKCNAAYPHLAHLPSAMADSSFRFPRTWWQSAEDVHREKIQLDLEAEFYFTHLIVMFKSPRPAAMVLDRSQDFGKTWKPYKYFATNCSATFGLEDDVVKKGAICTSKYSSPFPCTGGEVIFKALSPPHDTENPYSAKVQEQLKITNLRVQLLKRQSCPCQRNDLNEEPQHFTHYAIYDFIVKGSCFCNGHADQCIPVHGFRPVKAPGTFHMVHGKCMCKHNTAGSHCQHCAPLYNDRPWEAADGKTGAPNECRTRKCNGHADTCHFDVNVWEASGSRSGGVCDDCQHNTEGQYCQRCKPGFYRDLRRPFSAPDACKPCSCHPVGSAVLPANSVTFCDPSNGDCPCKPGVAGRRCDRCMVGYWGFGDYGCRPCDCAGSCDPITGDCISSHTDIDWCHEVPDFRPVHNKSEPAWEWEDAQGFSALLHSGKCECKEQTLGN

SEQ ID NO: 367 - DNA, 1452 bp, Homo sapiens
  CDS (1)..(1452)
aaagcctgcaaccctcggatgggaaatttggctttggggcgaaaactctgggcagacaccacctgcggtcagaatgctaccgaactgtactgcttctacagtgagaacaaggatctgacttgtcggcagcccaaatgtgacaagtgcaatgctgcctatcctcacctggctcacctgccatctgccatggcagactcatccttccggtttcctcgcacatggtggcagtctgcggaggatgtgcacagagaaaagatccagttagacctggaagctgaattctacttcactcacctaattgtgatgttcaagtcccccaggccggctgccatggtgctggaccgctcccaggactttgggaaaacatggaagccttataagtactttgcgactaactgctccgctacatttggcctggaagatgatgttgtcaagaagggcgctatttgtacttctaaatactccagtccttttccatgcactggaggagaggttattttcaaagctttgtcaccaccacacgatacagagaacccttacagtgccaaagttcaggagcagctgaagatcaccaaccttcgcgtgcagctgctgaaacgacagtcttgtccctgtcagagaaatgacctgaacgaagagcctcaacattttacacactatgcgatctatgatttcattgtcaagggcagctgcttctgcaatggccacgccgatcaatgcatacctgttcatggcttcagacctgtcaaggccccaggaacattccacatggtccatgggaagtgtatgtgtaagcacaacacagcaggcagccactgccagcactgtgccccgttatacaatgaccggccatgggaggcagctgatggcaaaacgggggctcccaacgagtgcagaacccgcaagtgtaatgggcatgctgatacctgtcacttcgacgttaatgtgtgggaggcatcagggaatcgtagtggtggtgtctgtgatgactgtcagcacaacacagaaggacagtattgccagaggtgcaagccaggcttctatcgtgacctgcggagacccttctcagctccagatgcttgcaaaccgtgttcctgccatccagtaggatcagctgtccttcctgccaactcagtgaccttctgcgaccccagcaatggtgactgcccttgcaagcctggggtggcagggcgacgttgtgacaggtgcatggtgggatactggggcttcggagactatggctgtcgaccatgtgactgtgcggggagctgtgaccctatcaccggagactgcatcagcagccacacagacatagactggtatcatgaagttcctgacttccgtcccgtgcacaataagagcgaaccagcctgggagtgggaggatgcgcaggggttttctgcacttctacactcaggtaaatgcgaatgtaaggaacagacattaggaaat

SEQ ID NO: 368 - protein, 484 aa, Homo sapiens
KACNPRMGNLALGRKLWADTTCGQNATELYCFYSENKDLTCRQPKCDKCNAAYPHLAHLPSAMADSSFRFPRTWWQSAEDVHREKIQLDLEAEFYFTHLIVMFKSPRPAAMVLDRSQDFGKTWKPYKYFATNCSATFGLEDDVVKKGAICTSKYSSPFPCTGGEVIFKALSPPHDTENPYSAKVQEQLKITNLRVQLLKRQSCPCQRNDLNEEPQHFTHYAIYDFIVKGSCFCNGHADQCIPVHGFRPVKAPGTFHMVHGKCMCKHNTAGSHCQHCAPLYNDRPWEAADGKTGAPNECRTRKCNGHADTCHFDVNVWEASGNRSGGVCDDCQHNTEGQYCQRCKPGFYRDLRRPFSAPDACKPCSCHPVGSAVLPANSVTFCDPSNGDCPCKPGVAGRRCDRCMVGYWGFGDYGCRPCDCAGSCDPITGDCISSHTDIDWYHEVPDFRPVHNKSEPAWEWEDAQGFSALLHSGKCECKEQTLGN

SEQ ID NO: 369 - DNA, 1452 bp, Homo sapiens
  CDS (1)..(1452)
aaagcctgcaaccctcggatgggaaatttggctttggggcgaaaactctgggcagacaccacctgcggtcagaatgctaccgaactgtactgcttctacagtgagaacaaggatctgacttgtcggcagcccaaatgtgacaagtgcaatgctgcctatcctcacctggctcacctgccatctgccatggcagactcatccttccggtttcctcgcacatggtggcagtctgcggaggatgtgcacagagaaaagatccagttagacctggaagctgaattctacttcactcacctaattgtgatgttcaagtcccccaggccggctgccatggtgctggaccgctcccaggactttgggaaaacatggaagccttataagtactttgcgactaactgctccgctacatttggcctggaagatgatgttgtcaagaagggcgctatttgtacttctaaatactccagtccttttccatgcactggaggagaggttattttcaaagctttgtcaccaccacacgatacagagaacccttacagtgccaaagttcaggagcagctgaagatcaccaaccttcgcgtgcagctgctgaaacgacagtcttgtccctgtcagagaaatgacctgaacgaagagcctcaacattttacacactatgcgatctatgatttcattgtcaagggcagctgcttctgcaatggccacgccgatcaatgcatacctgttcatggcttcagacctgtcaaggccccaggaacattccacatggtccatgggaagtgtatgtgtaagcacaacacagcaggcagccactgccagcactgtgccccgttatacaatgaccggccatgggaggcagctgatggcaaaacgggggctcccaacgagtgcagaacctgcaagtgtaatgggcatgctgatacctgtcacttcgacgttaatgtgtgggaggcatcagggagtcgtagtggtggtgtctgtgatgactgtcagcacaacacagaaggacagtattgccagaggtgcaagccaggcttctatcgtgacctgcggagacccttctcagctccagatgcttgcaaaccgtgttcctgccatccagtaggatcagctgtccttcctgccaactcagtgaccttctgcgaccccagcaatggtgactgcccttgcaagcctggggtggcagggcgacgttgtgacaggtgcatggtgggatactggggcttcggagactatggctgtcgaccatgtgactgtgcggggagctgtgaccctatcaccggagactgcatcagcagccacacagacatagactggtatcatgaagttcctgacttccgtcccgtgcacaataagagcgaaccagcctgggagtgggaggatgcgcaggggttttctgcacttctacactcaggtaaatgcgaatgtaaggaacagacattaggaaat

SEQ ID NO: 370 - protein, 484 aa, Homo sapiens
KACNPRMGNLALGRKLWADTTCGQNATELYCFYSENKDLTCRQPKCDKCNAAYPHLAHLPSAMADSSFRFPRTWWQSAEDVHREKIQLDLEAEFYFTHLIVMFKSPRPAAMVLDRSQDFGKTWKPYKYFATNCSATFGLEDDVVKKGAICTSKYSSPFPCTGGEVIFKALSPPHDTENPYSAKVQEQLKITNLRVQLLKRQSCPCQRNDLNEEPQHFTHYAIYDFIVKGSCFCNGHADQCIPVHGFRPVKAPGTFHMVHGKCMCKHNTAGSHCQHCAPLYNDRPWEAADGKTGAPNECRTCKCNGHADTCHFDVNVWEASGSRSGGVCDDCQHNTEGQYCQRCKPGFYRDLRRPFSAPDACKPCSCHPVGSAVLPANSVTFCDPSNGDCPCKPGVAGRRCDRCMVGYWGFGDYGCRPCDCAGSCDPITGDCISSHTDIDWYHEVPDFRPVHNKSEPAWEWEDAQGFSALLHSGKCECKEQTLGN

SEQ ID NO: 371 - DNA, 1452 bp, Homo sapiens
  CDS (1)..(1452)
aaagcctgcaaccctcggatgggaaatttggctttggggcgaaaactctgggcagacaccacctgcggtcagaatgctaccgaactgtactgcttctacagtgagaacaaggatctgacttgtcggcagcccaaatgtgacaagtgcaatgctgcctatcctcacctggctcacctgccatctgccatggcagactcatccttccggtttcctcgcacatggtggcagtctgcggaggatgtgcacagagaaaagatccagttagacctggaagctgaattctacttcactcacctaattgtgatgttcaagtcccccaggccggctgccatggtgctggaccgctcccaggactttgggaaaacatggaagccttataagtactttgcgactaactgctccgctacatttggcctggaagatgatgttgtcaagaagggcgctatttgtacttctaaatactccagtccttttccatgcactggaggagaggttattttcaaagctttgtcaccaccacacgatacagagaacccttacagtgccaaagttcaggagcagctgaagatcaccaaccttcgcgtgcagctgctgaaacgacagtcttgtccctgtcagagaaatgacctgaacgaagagcctcaacattttacacactatgcgatctatgatttcattgtcaagggcagctgcttctgcaatggccacgccgatcaatgcatacctgttcatggcttcagacctgtcaaggccccaggaacattccacatggtccatgggaagtgtatgtgtaagcacaacacagcaggcagccactgccagcactgtgccccgttatacaatgaccggccatgggaggcagctgatggcaaaacgggggctcccaacgagtgcagaacccgcaagtgtaatgggcatgctgatacctgtcacttcgacgttaatgtgtgggaggcatcagggagtcgtagtggtggtgtctgtgatgactgtcagcacaacacagaaggacagtattgccagaggtgcaagccaggcttctatcgtgacctgcggagacccttctcagctccagatgcttgcaaaccgtgttcctgccatccagtaggatcagctgtccttcctgccaactcagtgaccttctgcgaccccagcaatggtgactgcccttgcaagcctggggtggcagggcgacgttgtgacaggtgcatggtgggatactggggcttcggagactatggctgtcgaccatgtgactgtgcggggagctgtgaccctatcaccggagactgcatcagcagccacacagacatagactggtatcatgaagttcctgacttccgtcccgtgcacaataagagcgaaccagcctgggagtgggaggatgcgcaggggttttctgcacttctacactcaggtaaatgcgaatgtaaggaacagacattaggaaat

SEQ ID NO: 372 - protein, 484 aa, Homo sapiens
KACNPRMGNLALGRKLWADTTCGQNATELYCFYSENKDLTCRQPKCDKCNAAYPHLAHLPSAMADSSFRFPRTWWQSAEDVHREKIQLDLEAEFYFTHLIVMFKSPRPAAMVLDRSQDFGKTWKPYKYFATNCSATFGLEDDVVKKGAICTSKYSSPFPCTGGEVIFKALSPPHDTENPYSAKVQEQLKITNLRVQLLKRQSCPCQRNDLNEEPQHFTHYAIYDFIVKGSCFCNGHADQCIPVHGFRPVKAPGTFHMVHGKCMCKHNTAGSHCQHCAPLYNDRPWEAADGKTGAPNECRTRKCNGHADTCHFDVNVWEASGSRSGGVCDDCQHNTEGQYCQRCKPGFYRDLRRPFSAPDACKPCSCHPVGSAVLPANSVTFCDPSNGDCPCKPGVAGRRCDRCMVGYWGFGDYGCRPCDCAGSCDPITGDCISSHTDIDWYHEVPDFRPVHNKSEPAWEWEDAQGFSALLHSGKCECKEQTLGN

SEQ ID NO: 373 - DNA, 1461 bp, Homo sapiens
  CDS (1)..(1461)
atggggagctgcgcgcggctgctgctgctctggggccgcacggtggtggccgcaggactgagtggagtagctggagtgagttcccgctgtgaaaaagcctgcaaccctcggatgggaaatttggctttggggcgaaaactctgggcagacaccacctgcggtcagaatgctaccgaactgtactgcttctacagtgagaacacggatctgacttgtcggcagcccaaatgtgacaagtgcaatgctgcctatcctcacctggctcacctgccatctgccatggcagactcatccttccggtttcctcgcacatggtggcagtctgcggaggatgtgcacagagaaaagatccagttagacctggaagctgaattctacttcactcacctaattgtgatgttcaagtcccccaggccggctgccatggtgctggaccgctcccaggactttgggaaaacatggaagccttataagtactttgcgactaactgctccgctacatttggcctggaagatgatgttgtcaagaagggcgctatttgtactcctaaatactccagtccttttccatgcactggaggagaggttattttcaaagctttgtcaccaccatacgatacagagaacccttacagtgccaaagttcaggagcagctgaagatcaccaaccttcgcgtgcagctgctgaaacgacagtcttatccctgtcagagaaatgacctgaacgaagagcctcaacattttacacactatgcgatctatgatttcattgtcaagggcagctgcttctgcaatggccacgccgatcaatgcatacctgttcatggcttcagacctgtcaaggccccaggaacattccacatggtccatgggaagtgtatgtgtaagcacaacacagcaggcagccactgccagcactgtgccccgttatacaatgaccggccatgggaggcagctgatggcaaaacgggggctcccaacgagtgcagaacccgcaagtgtaatgggcatgctgatacctgtcacttcgacgttaatgtgtgggaggcatcagggagtcgtagtggtggtgtctgtgatgactgtcagcacaacacagaaggacagtattgccagaggtgcaagccaggcttctatcgtgacctgcggagacccttctcagctccagatgcttgcaaaccgtgttcctgccatccagtaggatcagctgtccttcctgccaactcagtgaccttctgcgaccccagcaatggtgactgcccttgcaagcctggggtggcagggcgacgttgtgacaggtgcatggtgggatactggggcttcggagactatggctgtcgaccatgtgactgtgcggggagctgtgaccctatcaccggagactgcatcagcagccacacagacatagactggtatcatgaagttcctgacggatccgagctcggtaccaagcttacgtag

SEQ ID NO: 374 - protein, 486 aa, Homo sapiens
MGSCARLLLLWGRTVVAAGLSGVAGVSSRCEKACNPRMGNLALGRKLWADTTCGQNATELYCFYSENTDLTCRQPKCDKCNAAYPHLAHLPSAMADSSFRFPRTWWQSAEDVHREKIQLDLEAEFYFTHLIVMFKSPRPAAMVLDRSQDFGKTWKPYKYFATNCSATFGLEDDVVKKGAICTPKYSSPFPCTGGEVIFKALSPPYDTENPYSAKVQEQLKITNLRVQLLKRQSYPCQRNDLNEEPQHFTHYAIYDFIVKGSCFCNGHADQCIPVHGFRPVKAPGTFHMVHGKCMCKHNTAGSHCQHCAPLYNDRPWEAADGKTGAPNECRTRKCNGHADTCHFDVNVWEASGSRSGGVCDDCQHNTEGQYCQRCKPGFYRDLRRPFSAPDACKPCSCHPVGSAVLPANSVTFCDPSNGDCPCKPGVAGRRCDRCMVGYWGFGDYGCRPCDCAGSCDPITGDCISSHTDIDWYHEVPDGSELGTKLT

SEQ ID NO: 375 - DNA, 1461 bp, Homo sapiens
  CDS (1)..(1461)
atggggagctgcgcgcggctgctgctgctctggggctgcacggtggtggccgcaggactgagtggagtagctggagtgagttcccgctgtgaaaaagcctgcaaccctcggatgggaaatttggctttggggcgaaaactctgggcagacaccacctgcggtcagaatgctaccgaactgtactgcttctacagtgagaacacggatctgacttgtcggcagcccaaatgtgacaagtgcaatgctgcctatcctcacctggctcacctgccatctgccatggcagactcatccttccggtttcctcgcacatggtggcagtctgcggaggatgtgcacagagaaaagatccagttagacctggaagctgaattctacttcactcacctaattgtgatgttcaagtcccccaggccggctgccatggtgctggaccgctcccaggactttgggaaaacatggaagccttataagtactttgcgactaactgctccgctacatttggcctggaagatgatgttgtcaagaagggcgctatttgtactcctaaatactccagtccttttccatgcactggaggagaggttattttcaaagctttgtcaccaccatacgatacagagaacccttacagtgccaaagttcaggagcagctgaagatcaccaaccttcgcgtgcagctgctgaaacgacagtcttatccctgtcagagaaatgacctgaacgaagagcctcaacattttacacactatgcgatctatgatttcattgtcaagggcagctgcttctgcaatggccacgccgatcaatgcatacctgttcatggcttcagacctgtcaaggccccaggaacattccacatggtccatgggaagtgtatgtgtaagcacaacacagcaggcagccactgccagcactgtgccccgttatacaatgaccggccatgggaggcagctgatggcaaaacgggggctcccaacgagtgcagaacccgcaagtgtaatgggcatgctgatacctgtcacttcgacgttaatgtgtgggaggcatcagggagtcgtagtggtggtgtctgtgatgactgtcagcacaacacagaaggacagtattgccagaggtgcaagccaggcttctatcgtgacctgcggagacccttctcagctccagatgcttgcaaaccgtgttcctgccatccagtaggatcagctgtccttcctgccaactcagtgaccttctgcgaccccagcaatggtgactgcccttgcaagcctggggtggcagggcgacgttgtgacaggtgcatggtgggatactggggcttcggagactatggctgtcgaccatgtgactgtgcggggagctgtgaccctatcaccggagactgcatcagcagccacacagacatagactggtatcatgaagttcctgacggatccgagctcggtaccaagcttacgtag

SEQ ID NO: 376 - protein, 486 aa, Homo sapiens
MGSCARLLLLWGCTVVAAGLSGVAGVSSRCEKACNPRMGNLALGRKLWADTTCGQNATELYCFYSENTDLTCRQPKCDKCNAAYPHLAHLPSAMADSSFRFPRTWWQSAEDVHREKIQLDLEAEFYFTHLIVMFKSPRPAAMVLDRSQDFGKTWKPYKYFATNCSATFGLEDDVVKKGAICTPKYSSPFPCTGGEVIFKALSPPYDTENPYSAKVQEQLKITNLRVQLLKRQSYPCQRNDLNEEPQHFTHYAIYDFIVKGSCFCNGHADQCIPVHGFRPVKAPGTFHMVHGKCMCKHNTAGSHCQHCAPLYNDRPWEAADGKTGAPNECRTRKCNGHADTCHFDVNVWEASGSRSGGVCDDCQHNTEGQYCQRCKPGFYRDLRRPFSAPDACKPCSCHPVGSAVLPANSVTFCDPSNGDCPCKPGVAGRRCDRCMVGYWGFGDYGCRPCDCAGSCDPITGDCISSHTDIDWYHEVPDGSELGTKLT

SEQ ID NO: 377 - DNA, 1431 bp, Homo sapiens
  CDS (1)..(1431)
atggggagctgcgcgcggctgctgctgctctggggccgcacggtggtggccgcaggactgagtggagtagctggagtgagttcccgctgtgaaaaagcctgcaaccctcggatgggaaatttggctttggggcgaaaactctgggcagacaccacctgcggtcagaatgctaccgaactgtactgcttctacagtgagaacacggatctgacttgtcggcagcccaaatgtgacaagtgcaatgctgcctatcctcacctggctcacctgccatctgccatggcagactcatccttccggtttcctcgcacatggtggcagtctgcggaggatgtgcacagagaaaagatccagttagacctggaagctgaattctacttcactcacctaattgtgatgttcaagtcccccaggccggctgccatggtgctggaccgctcccaggactttgggaaaacatggaagccttataagtactttgcgactaactgctccgctacatttggcctggaagatgatgttgtcaagaagggcgctatttgtactcctaaatactccagtccttttccatgcactggaggagaggttattttcaaagctttgtcaccaccatacgatacagagaacccttacagtgccaaagttcaggagcagctgaagatcaccaaccttcgcgtgcagctgctgaaacgacagtcttatccctgtcagagaaatgacctgaacgaagagcctcaacattttacacactatgcgatctatgatttcattgtcaagggcagctgcttctgcaatggccacgccgatcaatgcatacctgttcatggcttcagacctgtcaaggccccaggaacattccacatggtccatgggaagtgtatgtgtaagcacaacacagcaggcagccactgccagcactgtgccccgttatacaatgaccggccatgggaggcagctgatggcaaaacgggggctcccaacgagtgcagagcccgcaagtgtaatgggcatgctgatacctgtcacttcgacgttaatgtgtgggaggcatcagggagtcgtagtggtggtgtctgtgatgactgtcagcacaacacagaaggacagtattgccagaggtgcaagccaggcttctatcgtgacctgcggagacccttctcagctccagatgcttgcaaaccgtgttcctgccatccagtaggatcagctgtccttcctgccaactcagtgaccttctgcgaccccagcaatggtgactgcccttgcaagcctggggtggcagggcgacgttgtgacaggtgcatggtgggatactggggcttcggagactatggctgtcgaccatgtgactgtgcggggagctgtgaccctatcaccggagactgcatcagcagccacacagacatagactggtatcatgaagttcctgac

SEQ ID NO: 378 - protein, 477 aa, Homo sapiens
MGSCARLLLLWGRTVVAAGLSGVAGVSSRCEKACNPRMGNLALGRKLWADTTCGQNATELYCFYSENTDLTCRQPKCDKCNAAYPHLAHLPSAMADSSFRFPRTWWQSAEDVHREKIQLDLEAEFYFTHLIVMFKSPRPAAMVLDRSQDFGKTWKPYKYFATNCSATFGLEDDVVKKGAICTPKYSSPFPCTGGEVIFKALSPPYDTENPYSAKVQEQLKITNLRVQLLKRQSYPCQRNDLNEEPQHFTHYAIYDFIVKGSCFCNGHADQCIPVHGFRPVKAPGTFHMVHGKCMCKHNTAGSHCQHCAPLYNDRPWEAADGKTGAPNECRARKCNGHADTCHFDVNVWEASGSRSGGVCDDCQHNTEGQYCQRCKPGFYRDLRRPFSAPDACKPCSCHPVGSAVLPANSVTFCDPSNGDCPCKPGVAGRRCDRCMVGYWGFGDYGCRPCDCAGSCDPITGDCISSHTDIDWYHEVPD

SEQ ID NO: 379 - DNA, 1431 bp, Homo sapiens
  CDS (1)..(1431)
atggggagctgcgcgcggctgctgctgctctggggccgcacggtggtggccgcaggactgagtggagtagctggagtgagttcccgctgtgaaaaagcctgcaaccctcggatgggaaatttggctttggggcgaaaactctgggcagacaccacctgcggtcagaatgctaccgaactgtactgcttctacagtgagaacacggatctgacttgtcggcagcccaaatgtgacaagtgcaatgctgcctatcctcacctggctcacctgccatctgccatggcagactcatccttccggtttcctcgcacatggtggcagtctgcggaggatgtgcacagagaaaagatccagttagacctggaagctgaattctacttcactcacctaattgtgatgttcaagtcccccaggccggctgccatggtgctggaccgctcccaggactttgggaaaacatggaagccttataagtactttgcgactaactgctccgctacatttggcctggaagatgatgttgtcaagaagggcgctatttgtactcctaaatactccagtccttttccatgcactggaggagaggttattttcaaagctttgtcaccaccatacgatacagagaacccttacagtgccaaagttcaggagcagctgaagatcaccaaccttcgcgtgcagctgctgaaacgacagtcttatccctgtcagagaaatgacctgaacgaagagcctcaacattttacacactatgcgatctatgatttcattgtcaagggcagctgcttctgcaatggccacgccgatcaatgcatacctgttcatggcttcagacctgtcaaggccccaggaacattccacatggtccatgggaagtgtatgtgtaagcacaacacagcaggcagccactgccagcactgtgccccgttatacaatgaccggccatgggaggcagctgatggcaaaacgggggctcccaacgagtgcagaacctgcaagtgtaatgggcatgctgatacctgtcacttcgacgttaatgtgtgggaggcatcagggagtcgtagtggtggtgtctgtgatgactgtcagcacaacacagaaggacagtattgccagaggtgcaagccaggcttctatcgtgacctgcggagacccttctcagctccagatgcttgcaaaccgtgttcctgccatccagtaggatcagctgtccttcctgccaactcagtgaccttctgcgaccccagcaatggtgactgcccttgcaagcctggggtggcagggcgacgttgtgacaggtgcatggtgggatactggggcttcggagactatggctgtcgaccatgtgactgtgcggggagctgtgaccctatcaccggagactgcatcagcagccacacagacatagactggtatcatgaagttcctgac

SEQ ID NO: 380 - protein, 477 aa, Homo sapiens
MGSCARLLLLWGRTVVAAGLSGVAGVSSRCEKACNPRMGNLALGRKLWADTTCGQNATELYCFYSENTDLTCRQPKCDKCNAAYPHLAHLPSAMADSSFRFPRTWWQSAEDVHREKIQLDLEAEFYFTHLIVMFKSPRPAAMVLDRSQDFGKTWKPYKYFATNCSATFGLEDDVVKKGAICTPKYSSPFPCTGGEVIFKALSPPYDTENPYSAKVQEQLKITNLRVQLLKRQSYPCQRNDLNEEPQHFTHYAIYDFIVKGSCFCNGHADQCIPVHGFRPVKAPGTFHMVHGKCMCKHNTAGSHCQHCAPLYNDRPWEAADGKTGAPNECRTCKCNGHADTCHFDVNVWEASGSRSGGVCDDCQHNTEGQYCQRCKPGFYRDLRRPFSAPDACKPCSCHPVGSAVLPANSVTFCDPSNGDCPCKPGVAGRRCDRCMVGYWGFGDYGCRPCDCAGSCDPITGDCISSHTDIDWYHEVPD

SEQ ID NO: 381 - DNA, 1431 bp, Homo sapiens
  CDS (1)..(1431)
atggggagctgcgcgcggctgctgctgctctggggccgcacggtggtggccgcaggactgagtggagtagctggagtgagttcccgctgtgaaaaagcctgcaaccctcggatgggaaatttggctttggggcgaaaactctgggcagacaccacctgcggtcagaatgctaccgaactgtactgcttctacagtgagaacacggatctgacttgtcggcagcccaaatgtgacaagtgcaatgctgcctatcctcacctggctcacctgccatctgccatggcagactcatccttccggtttcctcgcacatggtggcagtctgcggaggatgtgcacagagaaaagatccagttagacctggaagctgaattctacttcactcacctaattgtgatgttcaagtcccccaggccggctgccatggtgctggaccgctcccaggactttgggaaaacatggaagccttataagtactttgcgactaactgctccgctacatttggcctggaagatgatgttgtcaagaagggcgctatttgtactcctaaatactccagtccttttccatgcactggaggagaggttattttcaaagctttgtcaccaccatacgatacagagaacccttacagtgccaaagttcaggagcagctgaagatcaccaaccttcgcgtgcagctgctgaaacgacagtcttatccctgtcagagaaatgacctgaacgaagagcctcaacattttacacactatgcgatctatgatttcattgtcaagggcagctgcttctgcaatggccacgccgatcaatgcatacctgttcatggcttcagacctgtcaaggccccaggaacattccacatggtccatgggaagtgtatgtgtaagcacaacacagcaggcagccactgccagcactgtgccccgttatacaatgaccggccatgggaggcagctgatggcaaaacgggggctcccaacgagtgcagaacccgcaagtgtaatgggcatgctgatacctgtcacttcgacgttaatgtgtgggaggcatcagggaatcgtagtggtggtgtctgtgatgactgtcagcacaacacagaaggacagtattgccagaggtgcaagccaggcttctatcgtgacctgcggagacccttctcagctccagatgcttgcaaaccgtgttcctgccatccagtaggatcagctgtccttcctgccaactcagtgaccttctgcgaccccagcaatggtgactgcccttgcaagcctggggtggcagggcgacgttgtgacaggtgcatggtgggatactggggcttcggagactatggctgtcgaccatgtgactgtgcggggagctgtgaccctatcaccggagactgcatcagcagccacacagacatagactggtatcatgaagttcctgac

SEQ ID NO: 382 - protein, 477 aa, Homo sapiens
MGSCARLLLLWGRTVVAAGLSGVAGVSSRCEKACNPRMGNLALGRKLWADTTCGQNATELYCFYSENTDLTCRQPKCDKCNAAYPHLAHLPSAMADSSFRFPRTWWQSAEDVHREKIQLDLEAEFYFTHLIVMFKSPRPAAMVLDRSQDFGKTWKPYKYFATNCSATFGLEDDVVKKGAICTPKYSSPFPCTGGEVIFKALSPPYDTENPYSAKVQEQLKITNLRVQLLKRQSYPCQRNDLNEEPQHFTHYAIYDFIVKGSCFCNGHADQCIPVHGFRPVKAPGTFHMVHGKCMCKHNTAGSHCQHCAPLYNDRPWEAADGKTGAPNECRTRKCNGHADTCHFDVNVWEASGNRSGGVCDDCQHNTEGQYCQRCKPGFYRDLRRPFSAPDACKPCSCHPVGSAVLPANSVTFCDPSNGDCPCKPGVAGRRCDRCMVGYWGFGDYGCRPCDCAGSCDPITGDCISSHTDIDWYHEVPD

SEQ ID NO: 383 - DNA, 1431 bp, Homo sapiens
  CDS (1)..(1431)
atggggagctgcgcgcggctgctgctgctctggggccgcacggtggtggccgcaggactgagtggagtagctggagtgagttcccgctgtgaaaaagcctgcaaccctcggatgggaaatttggctttggggcgaaaactctgggcagacaccacctgcggtcagaatgctaccgaactgtactgcttctacagtgagaacacggatctgacttgtcggcagcccaaatgtgacaagtgcaatgctgcctatcctcacctggctcacctgccatctgccatggcagactcatccttccggtttcctcgcacatggtggcagtctgcggaggatgtgcacagagaaaagatccagttagacctggaagctgaattctacttcactcacctaattgtgatgttcaagtcccccaggccggctgccatggtgctggaccgctcccaggactttgggaaaacatggaagccttataagtactttgcgactaactgctccgctacatttggcctggaagatgatgttgtcaagaagggcgctatttgtactcctaaatactccagtccttttccatgcactggaggagaggttattttcaaagctttgtcaccaccatacgatacagagaacccttacagtgccaaagttcaggagcagctgaagatcaccaaccttcgcgtgcagctgctgaaacgacagtcttatccctgtcagagaaatgacctgaacgaagagcctcaacattttacacactatgcgatctatgatttcattgtcaagggcagctgcttctgcaatggccacgccgatcaatgcatacctgttcatggcttcagacctgtcaaggccccaggaacattccacatggtccatgggaagtgtatgtgtaagcacaacacagcaggcagccactgccagcactgtgccccgttatacaatgaccggccatgggaggcagctgatggcaaaacgggggctcccaacgagtgcagaacccgcaagtgtaatgggcatgctgatacctgtcacttcgacgttaatgtgtgggaggcatcagggagtcgtagtggtggtgtctgtgatgactgtcagcacaacacagaaggacagtattgccagaggtgcaagccaggcttctatcgtgacctgcggagacccttctcagctccagatgcttgcaaaccgtgttcctgccatccagtaggatcagctgtccttcctgccaactcagtgaccttctgcgaccccagcaatggtgactgcccttgcaagcctggggtggcagggcgacgttgtgacaggtgcatggtgggatactggggcttcggagactatggctgtcgaccatgtgactgtgcggggagctgtgaccctatcaccggagactgcatcagcagccacacagacatagactggtgtcatgaagttcctgac

SEQ ID NO: 384 - protein, 477 aa, Homo sapiens
MGSCARLLLLWGRTVVAAGLSGVAGVSSRCEKACNPRMGNLALGRKLWADTTCGQNATELYCFYSENTDLTCRQPKCDKCNAAYPHLAHLPSAMADSSFRFPRTWWQSAEDVHREKIQLDLEAEFYFTHLIVMFKSPRPAAMVLDRSQDFGKTWKPYKYFATNCSATFGLEDDVVKKGAICTPKYSSPFPCTGGEVIFKALSPPYDTENPYSAKVQEQLKITNLRVQLLKRQSYPCQRNDLNEEPQHFTHYAIYDFIVKGSCFCNGHADQCIPVHGFRPVKAPGTFHMVHGKCMCKHNTAGSHCQHCAPLYNDRPWEAADGKTGAPNECRTRKCNGHADTCHFDVNVWEASGSRSGGVCDDCQHNTEGQYCQRCKPGFYRDLRRPFSAPDACKPCSCHPVGSAVLPANSVTFCDPSNGDCPCKPGVAGRRCDRCMVGYWGFGDYGCRPCDCAGSCDPITGDCISSHTDIDWCHEVPD

SEQ ID NO: 385 - DNA, 1431 bp, Homo sapiens
  CDS (1)..(1431)
atggggagctgcgcgcggctgctgctgctctggggccgcacggtggtggccgcaggactgagtggagtagctggagtgagttcccgctgtgaaaaagcctgcaaccctcggatgggaaatttggctttggggcgaaaactctgggcagacaccacctgcggtcagaatgctaccgaactgtactgcttctacagtgagaacacggatctgacttgtcggcagcccaaatgtgacaagtgcaatgctgcctatcctcacctggctcacctgccatctgccatggcagactcatccttccggtttcctcgcacatggtggcagtctgcggaggatgtgcacagagaaaagatccagttagacctggaagctgaattctacttcactcacctaattgtgatgttcaagtcccccaggccggctgccatggtgctggaccgctcccaggactttgggaaaacatggaagccttataagtactttgcgactaactgctccgctacatttggcctggaagatgatgttgtcaagaagggcgctatttgtactcctaaatactccagtccttttccatgcactggaggagaggttattttcaaagctttgtcaccaccatacgatacagagaacccttacagtgccaaagttcaggagcagctgaagatcaccaaccttcgcgtgcagctgctgaaacgacagtcttatccctgtcagagaaatgacctgaacgaagagcctcaacattttacacactatgcgatctatgatttcattgtcaagggcagctgcttctgcaatggccacgccgatcaatgcatacctgttcatggcttcagacctgtcaaggccccaggaacattccacatggtccatgggaagtgtatgtgtaagcacaacacagcaggcagccactgccagcactgtgccccgttatacaatgaccggccatgggaggcagctgatggcaaaacgggggctcccaacgagtgcagagcctgcaagtgtaatgggcatgctgatacctgtcacttcgacgttaatgtgtgggaggcatcagggagtcgtagtggtggtgtctgtgatgactgtcagcacaacacagaaggacagtattgccagaggtgcaagccaggcttctatcgtgacctgcggagacccttctcagctccagatgcttgcaaaccgtgttcctgccatccagtaggatcagctgtccttcctgccaactcagtgaccttctgcgaccccagcaatggtgactgcccttgcaagcctggggtggcagggcgacgttgtgacaggtgcatggtgggatactggggcttcggagactatggctgtcgaccatgtgactgtgcggggagctgtgaccctatcaccggagactgcatcagcagccacacagacatagactggtatcatgaagttcctgac

SEQ ID NO: 386 - protein, 477 aa, Homo sapiens
MGSCARLLLLWGRTVVAAGLSGVAGVSSRCEKACNPRMGNLALGRKLWADTTCGQNATELYCFYSENTDLTCRQPKCDKCNAAYPHLAHLPSAMADSSFRFPRTWWQSAEDVHREKIQLDLEAEFYFTHLIVMFKSPRPAAMVLDRSQDFGKTWKPYKYFATNCSATFGLEDDVVKKGAICTPKYSSPFPCTGGEVIFKALSPPYDTENPYSAKVQEQLKITNLRVQLLKRQSYPCQRNDLNEEPQHFTHYAIYDFIVKGSCFCNGHADQCIPVHGFRPVKAPGTFHMVHGKCMCKHNTAGSHCQHCAPLYNDRPWEAADGKTGAPNECRACKCNGHADTCHFDVNVWEASGSRSGGVCDDCQHNTEGQYCQRCKPGFYRDLRRPFSAPDACKPCSCHPVGSAVLPANSVTFCDPSNGDCPCKPGVAGRRCDRCMVGYWGFGDYGCRPCDCAGSCDPITGDCISSHTDIDWYHEVPD

SEQ ID NO: 387 - DNA, 1431 bp, Homo sapiens
  CDS (1)..(1431)
atggggagctgcgcgcggctgctgctgctctggggccgcacggtggtggccgcaggactgagtggagtagctggagtgagttcccgctgtgaaaaagcctgcaaccctcggatgggaaatttggctttggggcgaaaactctgggcagacaccacctgcggtcagaatgctaccgaactgtactgcttctacagtgagaacacggatctgacttgtcggcagcccaaatgtgacaagtgcaatgctgcctatcctcacctggctcacctgccatctgccatggcagactcatccttccggtttcctcgcacatggtggcagtctgcggaggatgtgcacagagaaaagatccagttagacctggaagctgaattctacttcactcacctaattgtgatgttcaagtcccccaggccggctgccatggtgctggaccgctcccaggactttgggaaaacatggaagccttataagtactttgcgactaactgctccgctacatttggcctggaagatgatgttgtcaagaagggcgctatttgtactcctaaatactccagtccttttccatgcactggaggagaggttattttcaaagctttgtcaccaccatacgatacagagaacccttacagtgccaaagttcaggagcagctgaagatcaccaaccttcgcgtgcagctgctgaaacgacagtcttatccctgtcagagaaatgacctgaacgaagagcctcaacattttacacactatgcgatctatgatttcattgtcaagggcagctgcttctgcaatggccacgccgatcaatgcatacctgttcatggcttcagacctgtcaaggccccaggaacattccacatggtccatgggaagtgtatgtgtaagcacaacacagcaggcagccactgccagcactgtgccccgttatacaatgaccggccatgggaggcagctgatggcaaaacgggggctcccaacgagtgcagagcccgcaagtgtaatgggcatgctgatacctgtcacttcgacgttaatgtgtgggaggcatcagggaatcgtagtggtggtgtctgtgatgactgtcagcacaacacagaaggacagtattgccagaggtgcaagccaggcttctatcgtgacctgcggagacccttctcagctccagatgcttgcaaaccgtgttcctgccatccagtaggatcagctgtccttcctgccaactcagtgaccttctgcgaccccagcaatggtgactgcccttgcaagcctggggtggcagggcgacgttgtgacaggtgcatggtgggatactggggcttcggagactatggctgtcgaccatgtgactgtgcggggagctgtgaccctatcaccggagactgcatcagcagccacacagacatagactggtatcatgaagttcctgac

SEQ ID NO: 388 - protein, 477 aa, Homo sapiens
MGSCARLLLLWGRTVVAAGLSGVAGVSSRCEKACNPRMGNLALGRKLWADTTCGQNATELYCFYSENTDLTCRQPKCDKCNAAYPHLAHLPSAMADSSFRFPRTWWQSAEDVHREKIQLDLEAEFYFTHLIVMFKSPRPAAMVLDRSQDFGKTWKPYKYFATNCSATFGLEDDVVKKGAICTPKYSSPFPCTGGEVIFKALSPPYDTENPYSAKVQEQLKITNLRVQLLKRQSYPCQRNDLNEEPQHFTHYAIYDFIVKGSCFCNGHADQCIPVHGFRPVKAPGTFHMVHGKCMCKHNTAGSHCQHCAPLYNDRPWEAADGKTGAPNECRARKCNGHADTCHFDVNVWEASGNRSGGVCDDCQHNTEGQYCQRCKPGFYRDLRRPFSAPDACKPCSCHPVGSAVLPANSVTFCDPSNGDCPCKPGVAGRRCDRCMVGYWGFGDYGCRPCDCAGSCDPITGDCISSHTDIDWYHEVPD

SEQ ID NO: 389 - DNA, 1431 bp, Homo sapiens
  CDS (1)..(1431)
atggggagctgcgcgcggctgctgctgctctggggccgcacggtggtggccgcaggactgagtggagtagctggagtgagttcccgctgtgaaaaagcctgcaaccctcggatgggaaatttggctttggggcgaaaactctgggcagacaccacctgcggtcagaatgctaccgaactgtactgcttctacagtgagaacacggatctgacttgtcggcagcccaaatgtgacaagtgcaatgctgcctatcctcacctggctcacctgccatctgccatggcagactcatccttccggtttcctcgcacatggtggcagtctgcggaggatgtgcacagagaaaagatccagttagacctggaagctgaattctacttcactcacctaattgtgatgttcaagtcccccaggccggctgccatggtgctggaccgctcccaggactttgggaaaacatggaagccttataagtactttgcgactaactgctccgctacatttggcctggaagatgatgttgtcaagaagggcgctatttgtactcctaaatactccagtccttttccatgcactggaggagaggttattttcaaagctttgtcaccaccatacgatacagagaacccttacagtgccaaagttcaggagcagctgaagatcaccaaccttcgcgtgcagctgctgaaacgacagtcttatccctgtcagagaaatgacctgaacgaagagcctcaacattttacacactatgcgatctatgatttcattgtcaagggcagctgcttctgcaatggccacgccgatcaatgcatacctgttcatggcttcagacctgtcaaggccccaggaacattccacatggtccatgggaagtgtatgtgtaagcacaacacagcaggcagccactgccagcactgtgccccgttatacaatgaccggccatgggaggcagctgatggcaaaacgggggctcccaacgagtgcagagcccgcaagtgtaatgggcatgctgatacctgtcacttcgacgttaatgtgtgggaggcatcagggagtcgtagtggtggtgtctgtgatgactgtcagcacaacacagaaggacagtattgccagaggtgcaagccaggcttctatcgtgacctgcggagacccttctcagctccagatgcttgcaaaccgtgttcctgccatccagtaggatcagctgtccttcctgccaactcagtgaccttctgcgaccccagcaatggtgactgcccttgcaagcctggggtggcagggcgacgttgtgacaggtgcatggtgggatactggggcttcggagactatggctgtcgaccatgtgactgtgcggggagctgtgaccctatcaccggagactgcatcagcagccacacagacatagactggtgtcatgaagttcctgac

SEQ ID NO: 390 - protein, 477 aa, Homo sapiens
MGSCARLLLLWGRTVVAAGLSGVAGVSSRCEKACNPRMGNLALGRKLWADTTCGQNATELYCFYSENTDLTCRQPKCDKCNAAYPHLAHLPSAMADSSFRFPRTWWQSAEDVHREKIQLDLEAEFYFTHLIVMFKSPRPAAMVLDRSQDFGKTWKPYKYFATNCSATFGLEDDVVKKGAICTPKYSSPFPCTGGEVIFKALSPPYDTENPYSAKVQEQLKITNLRVQLLKRQSYPCQRNDLNEEPQHFTHYAIYDFIVKGSCFCNGHADQCIPVHGFRPVKAPGTFHMVHGKCMCKHNTAGSHCQHCAPLYNDRPWEAADGKTGAPNECRARKCNGHADTCHFDVNVWEASGSRSGGVCDDCQHNTEGQYCQRCKPGFYRDLRRPFSAPDACKPCSCHPVGSAVLPANSVTFCDPSNGDCPCKPGVAGRRCDRCMVGYWGFGDYGCRPCDCAGSCDPITGDCISSHTDIDWCHEVPD

SEQ ID NO: 391 - DNA, 1431 bp, Homo sapiens
  CDS (1)..(1431)
atggggagctgcgcgcggctgctgctgctctggggccgcacggtggtggccgcaggactgagtggagtagctggagtgagttcccgctgtgaaaaagcctgcaaccctcggatgggaaatttggctttggggcgaaaactctgggcagacaccacctgcggtcagaatgctaccgaactgtactgcttctacagtgagaacacggatctgacttgtcggcagcccaaatgtgacaagtgcaatgctgcctatcctcacctggctcacctgccatctgccatggcagactcatccttccggtttcctcgcacatggtggcagtctgcggaggatgtgcacagagaaaagatccagttagacctggaagctgaattctacttcactcacctaattgtgatgttcaagtcccccaggccggctgccatggtgctggaccgctcccaggactttgggaaaacatggaagccttataagtactttgcgactaactgctccgctacatttggcctggaagatgatgttgtcaagaagggcgctatttgtactcctaaatactccagtccttttccatgcactggaggagaggttattttcaaagctttgtcaccaccatacgatacagagaacccttacagtgccaaagttcaggagcagctgaagatcaccaaccttcgcgtgcagctgctgaaacgacagtcttatccctgtcagagaaatgacctgaacgaagagcctcaacattttacacactatgcgatctatgatttcattgtcaagggcagctgcttctgcaatggccacgccgatcaatgcatacctgttcatggcttcagacctgtcaaggccccaggaacattccacatggtccatgggaagtgtatgtgtaagcacaacacagcaggcagccactgccagcactgtgccccgttatacaatgaccggccatgggaggcagctgatggcaaaacgggggctcccaacgagtgcagaacctgcaagtgtaatgggcatgctgatacctgtcacttcgacgttaatgtgtgggaggcatcagggaatcgtagtggtggtgtctgtgatgactgtcagcacaacacagaaggacagtattgccagaggtgcaagccaggcttctatcgtgacctgcggagacccttctcagctccagatgcttgcaaaccgtgttcctgccatccagtaggatcagctgtccttcctgccaactcagtgaccttctgcgaccccagcaatggtgactgcccttgcaagcctggggtggcagggcgacgttgtgacaggtgcatggtgggatactggggcttcggagactatggctgtcgaccatgtgactgtgcggggagctgtgaccctatcaccggagactgcatcagcagccacacagacatagactggtatcatgaagttcctgac

SEQ ID NO: 392 - protein, 477 aa, Homo sapiens
MGSCARLLLLWGRTVVAAGLSGVAGVSSRCEKACNPRMGNLALGRKLWADTTCGQNATELYCFYSENTDLTCRQPKCDKCNAAYPHLAHLPSAMADSSFRFPRTWWQSAEDVHREKIQLDLEAEFYFTHLIVMFKSPRPAAMVLDRSQDFGKTWKPYKYFATNCSATFGLEDDVVKKGAICTPKYSSPFPCTGGEVIFKALSPPYDTENPYSAKVQEQLKITNLRVQLLKRQSYPCQRNDLNEEPQHFTHYAIYDFIVKGSCFCNGHADQCIPVHGFRPVKAPGTFHMVHGKCMCKHNTAGSHCQHCAPLYNDRPWEAADGKTGAPNECRTCKCNGHADTCHFDVNVWEASGNRSGGVCDDCQHNTEGQYCQRCKPGFYRDLRRPFSAPDACKPCSCHPVGSAVLPANSVTFCDPSNGDCPCKPGVAGRRCDRCMVGYWGFGDYGCRPCDCAGSCDPITGDCISSHTDIDWYHEVPD

SEQ ID NO: 393 - DNA, 1431 bp, Homo sapiens
  CDS (1)..(1431)
atggggagctgcgcgcggctgctgctgctctggggccgcacggtggtggccgcaggactgagtggagtagctggagtgagttcccgctgtgaaaaagcctgcaaccctcggatgggaaatttggctttggggcgaaaactctgggcagacaccacctgcggtcagaatgctaccgaactgtactgcttctacagtgagaacacggatctgacttgtcggcagcccaaatgtgacaagtgcaatgctgcctatcctcacctggctcacctgccatctgccatggcagactcatccttccggtttcctcgcacatggtggcagtctgcggaggatgtgcacagagaaaagatccagttagacctggaagctgaattctacttcactcacctaattgtgatgttcaagtcccccaggccggctgccatggtgctggaccgctcccaggactttgggaaaacatggaagccttataagtactttgcgactaactgctccgctacatttggcctggaagatgatgttgtcaagaagggcgctatttgtactcctaaatactccagtccttttccatgcactggaggagaggttattttcaaagctttgtcaccaccatacgatacagagaacccttacagtgccaaagttcaggagcagctgaagatcaccaaccttcgcgtgcagctgctgaaacgacagtcttatccctgtcagagaaatgacctgaacgaagagcctcaacattttacacactatgcgatctatgatttcattgtcaagggcagctgcttctgcaatggccacgccgatcaatgcatacctgttcatggcttcagacctgtcaaggccccaggaacattccacatggtccatgggaagtgtatgtgtaagcacaacacagcaggcagccactgccagcactgtgccccgttatacaatgaccggccatgggaggcagctgatggcaaaacgggggctcccaacgagtgcagaacctgcaagtgtaatgggcatgctgatacctgtcacttcgacgttaatgtgtgggaggcatcagggagtcgtagtggtggtgtctgtgatgactgtcagcacaacacagaaggacagtattgccagaggtgcaagccaggcttctatcgtgacctgcggagacccttctcagctccagatgcttgcaaaccgtgttcctgccatccagtaggatcagctgtccttcctgccaactcagtgaccttctgcgaccccagcaatggtgactgcccttgcaagcctggggtggcagggcgacgttgtgacaggtgcatggtgggatactggggcttcggagactatggctgtcgaccatgtgactgtgcggggagctgtgaccctatcaccggagactgcatcagcagccacacagacatagactggtgtcatgaagttcctgac

SEQ ID NO: 394 - protein, 477 aa, Homo sapiens
MGSCARLLLLWGRTVVAAGLSGVAGVSSRCEKACNPRMGNLALGRKLWADTTCGQNATELYCFYSENTDLTCRQPKCDKCNAAYPHLAHLPSAMADSSFRFPRTWWQSAEDVHREKIQLDLEAEFYFTHLIVMFKSPRPAAMVLDRSQDFGKTWKPYKYFATNCSATFGLEDDVVKKGAICTPKYSSPFPCTGGEVIFKALSPPYDTENPYSAKVQEQLKITNLRVQLLKRQSYPCQRNDLNEEPQHFTHYAIYDFIVKGSCFCNGHADQCIPVHGFRPVKAPGTFHMVHGKCMCKHNTAGSHCQHCAPLYNDRPWEAADGKTGAPNECRTCKCNGHADTCHFDVNVWEASGSRSGGVCDDCQHNTEGQYCQRCKPGFYRDLRRPFSAPDACKPCSCHPVGSAVLPANSVTFCDPSNGDCPCKPGVAGRRCDRCMVGYWGFGDYGCRPCDCAGSCDPITGDCISSHTDIDWCHEVPD

SEQ ID NO: 395 - DNA, 1431 bp, Homo sapiens
  CDS (1)..(1431)
atggggagctgcgcgcggctgctgctgctctggggccgcacggtggtggccgcaggactgagtggagtagctggagtgagttcccgctgtgaaaaagcctgcaaccctcggatgggaaatttggctttggggcgaaaactctgggcagacaccacctgcggtcagaatgctaccgaactgtactgcttctacagtgagaacacggatctgacttgtcggcagcccaaatgtgacaagtgcaatgctgcctatcctcacctggctcacctgccatctgccatggcagactcatccttccggtttcctcgcacatggtggcagtctgcggaggatgtgcacagagaaaagatccagttagacctggaagctgaattctacttcactcacctaattgtgatgttcaagtcccccaggccggctgccatggtgctggaccgctcccaggactttgggaaaacatggaagccttataagtactttgcgactaactgctccgctacatttggcctggaagatgatgttgtcaagaagggcgctatttgtactcctaaatactccagtccttttccatgcactggaggagaggttattttcaaagctttgtcaccaccatacgatacagagaacccttacagtgccaaagttcaggagcagctgaagatcaccaaccttcgcgtgcagctgctgaaacgacagtcttatccctgtcagagaaatgacctgaacgaagagcctcaacattttacacactatgcgatctatgatttcattgtcaagggcagctgcttctgcaatggccacgccgatcaatgcatacctgttcatggcttcagacctgtcaaggccccaggaacattccacatggtccatgggaagtgtatgtgtaagcacaacacagcaggcagccactgccagcactgtgccccgttatacaatgaccggccatgggaggcagctgatggcaaaacgggggctcccaacgagtgcagaacccgcaagtgtaatgggcatgctgatacctgtcacttcgacgttaatgtgtgggaggcatcagggaatcgtagtggtggtgtctgtgatgactgtcagcacaacacagaaggacagtattgccagaggtgcaagccaggcttctatcgtgacctgcggagacccttctcagctccagatgcttgcaaaccgtgttcctgccatccagtaggatcagctgtccttcctgccaactcagtgaccttctgcgaccccagcaatggtgactgcccttgcaagcctggggtggcagggcgacgttgtgacaggtgcatggtgggatactggggcttcggagactatggctgtcgaccatgtgactgtgcggggagctgtgaccctatcaccggagactgcatcagcagccacacagacatagactggtgtcatgaagttcctgac

SEQ ID NO: 396 - protein, 477 aa, Homo sapiens
MGSCARLLLLWGRTVVAAGLSGVAGVSSRCEKACNPRMGNLALGRKLWADTTCGQNATELYCFYSENTDLTCRQPKCDKCNAAYPHLAHLPSAMADSSFRFPRTWWQSAEDVHREKIQLDLEAEFYFTHLIVMFKSPRPAAMVLDRSQDFGKTWKPYKYFATNCSATFGLEDDVVKKGAICTPKYSSPFPCTGGEVIFKALSPPYDTENPYSAKVQEQLKITNLRVQLLKRQSYPCQRNDLNEEPQHFTHYAIYDFIVKGSCFCNGHADQCIPVHGFRPVKAPGTFHMVHGKCMCKHNTAGSHCQHCAPLYNDRPWEAADGKTGAPNECRTRKCNGHADTCHFDVNVWEASGNRSGGVCDDCQHNTEGQYCQRCKPGFYRDLRRPFSAPDACKPCSCHPVGSAVLPANSVTFCDPSNGDCPCKPGVAGRRCDRCMVGYWGFGDYGCRPCDCAGSCDPITGDCISSHTDIDWCHEVPD

SEQ ID NO: 397 - DNA, 1431 bp, Homo sapiens
  CDS (1)..(1431)
atggggagctgcgcgcggctgctgctgctctggggccgcacggtggtggccgcaggactgagtggagtagctggagtgagttcccgctgtgaaaaagcctgcaaccctcggatgggaaatttggctttggggcgaaaactctgggcagacaccacctgcggtcagaatgctaccgaactgtactgcttctacagtgagaacacggatctgacttgtcggcagcccaaatgtgacaagtgcaatgctgcctatcctcacctggctcacctgccatctgccatggcagactcatccttccggtttcctcgcacatggtggcagtctgcggaggatgtgcacagagaaaagatccagttagacctggaagctgaattctacttcactcacctaattgtgatgttcaagtcccccaggccggctgccatggtgctggaccgctcccaggactttgggaaaacatggaagccttataagtactttgcgactaactgctccgctacatttggcctggaagatgatgttgtcaagaagggcgctatttgtactcctaaatactccagtccttttccatgcactggaggagaggttattttcaaagctttgtcaccaccatacgatacagagaacccttacagtgccaaagttcaggagcagctgaagatcaccaaccttcgcgtgcagctgctgaaacgacagtcttatccctgtcagagaaatgacctgaacgaagagcctcaacattttacacactatgcgatctatgatttcattgtcaagggcagctgcttctgcaatggccacgccgatcaatgcatacctgttcatggcttcagacctgtcaaggccccaggaacattccacatggtccatgggaagtgtatgtgtaagcacaacacagcaggcagccactgccagcactgtgccccgttatacaatgaccggccatgggaggcagctgatggcaaaacgggggctcccaacgagtgcagagcctgcaagtgtaatgggcatgctgatacctgtcacttcgacgttaatgtgtgggaggcatcagggaatcgtagtggtggtgtctgtgatgactgtcagcacaacacagaaggacagtattgccagaggtgcaagccaggcttctatcgtgacctgcggagacccttctcagctccagatgcttgcaaaccgtgttcctgccatccagtaggatcagctgtccttcctgccaactcagtgaccttctgcgaccccagcaatggtgactgcccttgcaagcctggggtggcagggcgacgttgtgacaggtgcatggtgggatactggggcttcggagactatggctgtcgaccatgtgactgtgcggggagctgtgaccctatcaccggagactgcatcagcagccacacagacatagactggtatcatgaagttcctgac

SEQ ID NO: 398 - protein, 477 aa, Homo sapiens
MGSCARLLLLWGRTVVAAGLSGVAGVSSRCEKACNPRMGNLALGRKLWADTTCGQNATELYCFYSENTDLTCRQPKCDKCNAAYPHLAHLPSAMADSSFRFPRTWWQSAEDVHREKIQLDLEAEFYFTHLIVMFKSPRPAAMVLDRSQDFGKTWKPYKYFATNCSATFGLEDDVVKKGAICTPKYSSPFPCTGGEVIFKALSPPYDTENPYSAKVQEQLKITNLRVQLLKRQSYPCQRNDLNEEPQHFTHYAIYDFIVKGSCFCNGHADQCIPVHGFRPVKAPGTFHMVHGKCMCKHNTAGSHCQHCAPLYNDRPWEAADGKTGAPNECRACKCNGHADTCHFDVNVWEASGNRSGGVCDDCQHNTEGQYCQRCKPGFYRDLRRPFSAPDACKPCSCHPVGSAVLPANSVTFCDPSNGDCPCKPGVAGRRCDRCMVGYWGFGDYGCRPCDCAGSCDPITGDCISSHTDIDWYHEVPD

SEQ ID NO: 399 - DNA, 1431 bp, Homo sapiens
  CDS (1)..(1431)
atggggagctgcgcgcggctgctgctgctctggggccgcacggtggtggccgcaggactgagtggagtagctggagtgagttcccgctgtgaaaaagcctgcaaccctcggatgggaaatttggctttggggcgaaaactctgggcagacaccacctgcggtcagaatgctaccgaactgtactgcttctacagtgagaacacggatctgacttgtcggcagcccaaatgtgacaagtgcaatgctgcctatcctcacctggctcacctgccatctgccatggcagactcatccttccggtttcctcgcacatggtggcagtctgcggaggatgtgcacagagaaaagatccagttagacctggaagctgaattctacttcactcacctaattgtgatgttcaagtcccccaggccggctgccatggtgctggaccgctcccaggactttgggaaaacatggaagccttataagtactttgcgactaactgctccgctacatttggcctggaagatgatgttgtcaagaagggcgctatttgtactcctaaatactccagtccttttccatgcactggaggagaggttattttcaaagctttgtcaccaccatacgatacagagaacccttacagtgccaaagttcaggagcagctgaagatcaccaaccttcgcgtgcagctgctgaaacgacagtcttatccctgtcagagaaatgacctgaacgaagagcctcaacattttacacactatgcgatctatgatttcattgtcaagggcagctgcttctgcaatggccacgccgatcaatgcatacctgttcatggcttcagacctgtcaaggccccaggaacattccacatggtccatgggaagtgtatgtgtaagcacaacacagcaggcagccactgccagcactgtgccccgttatacaatgaccggccatgggaggcagctgatggcaaaacgggggctcccaacgagtgcagagcctgcaagtgtaatgggcatgctgatacctgtcacttcgacgttaatgtgtgggaggcatcagggagtcgtagtggtggtgtctgtgatgactgtcagcacaacacagaaggacagtattgccagaggtgcaagccaggcttctatcgtgacctgcggagacccttctcagctccagatgcttgcaaaccgtgttcctgccatccagtaggatcagctgtccttcctgccaactcagtgaccttctgcgaccccagcaatggtgactgcccttgcaagcctggggtggcagggcgacgttgtgacaggtgcatggtgggatactggggcttcggagactatggctgtcgaccatgtgactgtgcggggagctgtgaccctatcaccggagactgcatcagcagccacacagacatagactggtgtcatgaagttcctgac

SEQ ID NO: 400 - protein, 477 aa, Homo sapiens
MGSCARLLLLWGRTVVAAGLSGVAGVSSRCEKACNPRMGNLALGRKLWADTTCGQNATELYCFYSENTDLTCRQPKCDKCNAAYPHLAHLPSAMADSSFRFPRTWWQSAEDVHREKIQLDLEAEFYFTHLIVMFKSPRPAAMVLDRSQDFGKTWKPYKYFATNCSATFGLEDDVVKKGAICTPKYSSPFPCTGGEVIFKALSPPYDTENPYSAKVQEQLKITNLRVQLLKRQSYPCQRNDLNEEPQHFTHYAIYDFIVKGSCFCNGHADQCIPVHGFRPVKAPGTFHMVHGKCMCKHNTAGSHCQHCAPLYNDRPWEAADGKTGAPNECRACKCNGHADTCHFDVNVWEASGSRSGGVCDDCQHNTEGQYCQRCKPGFYRDLRRPFSAPDACKPCSCHPVGSAVLPANSVTFCDPSNGDCPCKPGVAGRRCDRCMVGYWGFGDYGCRPCDCAGSCDPITGDCISSHTDIDWCHEVPD

SEQ ID NO: 401 - DNA, 1431 bp, Homo sapiens
  CDS (1)..(1431)
atggggagctgcgcgcggctgctgctgctctggggccgcacggtggtggccgcaggactgagtggagtagctggagtgagttcccgctgtgaaaaagcctgcaaccctcggatgggaaatttggctttggggcgaaaactctgggcagacaccacctgcggtcagaatgctaccgaactgtactgcttctacagtgagaacacggatctgacttgtcggcagcccaaatgtgacaagtgcaatgctgcctatcctcacctggctcacctgccatctgccatggcagactcatccttccggtttcctcgcacatggtggcagtctgcggaggatgtgcacagagaaaagatccagttagacctggaagctgaattctacttcactcacctaattgtgatgttcaagtcccccaggccggctgccatggtgctggaccgctcccaggactttgggaaaacatggaagccttataagtactttgcgactaactgctccgctacatttggcctggaagatgatgttgtcaagaagggcgctatttgtactcctaaatactccagtccttttccatgcactggaggagaggttattttcaaagctttgtcaccaccatacgatacagagaacccttacagtgccaaagttcaggagcagctgaagatcaccaaccttcgcgtgcagctgctgaaacgacagtcttatccctgtcagagaaatgacctgaacgaagagcctcaacattttacacactatgcgatctatgatttcattgtcaagggcagctgcttctgcaatggccacgccgatcaatgcatacctgttcatggcttcagacctgtcaaggccccaggaacattccacatggtccatgggaagtgtatgtgtaagcacaacacagcaggcagccactgccagcactgtgccccgttatacaatgaccggccatgggaggcagctgatggcaaaacgggggctcccaacgagtgcagagcccgcaagtgtaatgggcatgctgatacctgtcacttcgacgttaatgtgtgggaggcatcagggaatcgtagtggtggtgtctgtgatgactgtcagcacaacacagaaggacagtattgccagaggtgcaagccaggcttctatcgtgacctgcggagacccttctcagctccagatgcttgcaaaccgtgttcctgccatccagtaggatcagctgtccttcctgccaactcagtgaccttctgcgaccccagcaatggtgactgcccttgcaagcctggggtggcagggcgacgttgtgacaggtgcatggtgggatactggggcttcggagactatggctgtcgaccatgtgactgtgcggggagctgtgaccctatcaccggagactgcatcagcagccacacagacatagactggtgtcatgaagttcctgac

SEQ ID NO: 402 - protein, 477 aa, Homo sapiens
MGSCARLLLLWGRTVVAAGLSGVAGVSSRCEKACNPRMGNLALGRKLWADTTCGQNATELYCFYSENTDLTCRQPKCDKCNAAYPHLAHLPSAMADSSFRFPRTWWQSAEDVHREKIQLDLEAEFYFTHLIVMFKSPRPAAMVLDRSQDFGKTWKPYKYFATNCSATFGLEDDVVKKGAICTPKYSSPFPCTGGEVIFKALSPPYDTENPYSAKVQEQLKITNLRVQLLKRQSYPCQRNDLNEEPQHFTHYAIYDFIVKGSCFCNGHADQCIPVHGFRPVKAPGTFHMVHGKCMCKHNTAGSHCQHCAPLYNDRPWEAADGKTGAPNECRARKCNGHADTCHFDVNVWEASGNRSGGVCDDCQHNTEGQYCQRCKPGFYRDLRRPFSAPDACKPCSCHPVGSAVLPANSVTFCDPSNGDCPCKPGVAGRRCDRCMVGYWGFGDYGCRPCDCAGSCDPITGDCISSHTDIDWCHEVPD

SEQ ID NO: 403 - DNA, 1431 bp, Homo sapiens
  CDS (1)..(1431)
atggggagctgcgcgcggctgctgctgctctggggccgcacggtggtggccgcaggactgagtggagtagctggagtgagttcccgctgtgaaaaagcctgcaaccctcggatgggaaatttggctttggggcgaaaactctgggcagacaccacctgcggtcagaatgctaccgaactgtactgcttctacagtgagaacacggatctgacttgtcggcagcccaaatgtgacaagtgcaatgctgcctatcctcacctggctcacctgccatctgccatggcagactcatccttccggtttcctcgcacatggtggcagtctgcggaggatgtgcacagagaaaagatccagttagacctggaagctgaattctacttcactcacctaattgtgatgttcaagtcccccaggccggctgccatggtgctggaccgctcccaggactttgggaaaacatggaagccttataagtactttgcgactaactgctccgctacatttggcctggaagatgatgttgtcaagaagggcgctatttgtactcctaaatactccagtccttttccatgcactggaggagaggttattttcaaagctttgtcaccaccatacgatacagagaacccttacagtgccaaagttcaggagcagctgaagatcaccaaccttcgcgtgcagctgctgaaacgacagtcttatccctgtcagagaaatgacctgaacgaagagcctcaacattttacacactatgcgatctatgatttcattgtcaagggcagctgcttctgcaatggccacgccgatcaatgcatacctgttcatggcttcagacctgtcaaggccccaggaacattccacatggtccatgggaagtgtatgtgtaagcacaacacagcaggcagccactgccagcactgtgccccgttatacaatgaccggccatgggaggcagctgatggcaaaacgggggctcccaacgagtgcagaacctgcaagtgtaatgggcatgctgatacctgtcacttcgacgttaatgtgtgggaggcatcagggaatcgtagtggtggtgtctgtgatgactgtcagcacaacacagaaggacagtattgccagaggtgcaagccaggcttctatcgtgacctgcggagacccttctcagctccagatgcttgcaaaccgtgttcctgccatccagtaggatcagctgtccttcctgccaactcagtgaccttctgcgaccccagcaatggtgactgcccttgcaagcctggggtggcagggcgacgttgtgacaggtgcatggtgggatactggggcttcggagactatggctgtcgaccatgtgactgtgcggggagctgtgaccctatcaccggagactgcatcagcagccacacagacatagactggtgtcatgaagttcctgac

SEQ ID NO: 404 - protein, 477 aa, Homo sapiens
MGSCARLLLLWGRTVVAAGLSGVAGVSSRCEKACNPRMGNLALGRKLWADTTCGQNATELYCFYSENTDLTCRQPKCDKCNAAYPHLAHLPSAMADSSFRFPRTWWQSAEDVHREKIQLDLEAEFYFTHLIVMFKSPRPAAMVLDRSQDFGKTWKPYKYFATNCSATFGLEDDVVKKGAICTPKYSSPFPCTGGEVIFKALSPPYDTENPYSAKVQEQLKITNLRVQLLKRQSYPCQRNDLNEEPQHFTHYAIYDFIVKGSCFCNGHADQCIPVHGFRPVKAPGTFHMVHGKCMCKHNTAGSHCQHCAPLYNDRPWEAADGKTGAPNECRTCKCNGHADTCHFDVNVWEASGNRSGGVCDDCQHNTEGQYCQRCKPGFYRDLRRPFSAPDACKPCSCHPVGSAVLPANSVTFCDPSNGDCPCKPGVAGRRCDRCMVGYWGFGDYGCRPCDCAGSCDPITGDCISSHTDIDWCHEVPD

SEQ ID NO: 405 - DNA, 1431 bp, Homo sapiens
  CDS (1)..(1431)
atggggagctgcgcgcggctgctgctgctctggggccgcacggtggtggccgcaggactgagtggagtagctggagtgagttcccgctgtgaaaaagcctgcaaccctcggatgggaaatttggctttggggcgaaaactctgggcagacaccacctgcggtcagaatgctaccgaactgtactgcttctacagtgagaacacggatctgacttgtcggcagcccaaatgtgacaagtgcaatgctgcctatcctcacctggctcacctgccatctgccatggcagactcatccttccggtttcctcgcacatggtggcagtctgcggaggatgtgcacagagaaaagatccagttagacctggaagctgaattctacttcactcacctaattgtgatgttcaagtcccccaggccggctgccatggtgctggaccgctcccaggactttgggaaaacatggaagccttataagtactttgcgactaactgctccgctacatttggcctggaagatgatgttgtcaagaagggcgctatttgtactcctaaatactccagtccttttccatgcactggaggagaggttattttcaaagctttgtcaccaccatacgatacagagaacccttacagtgccaaagttcaggagcagctgaagatcaccaaccttcgcgtgcagctgctgaaacgacagtcttatccctgtcagagaaatgacctgaacgaagagcctcaacattttacacactatgcgatctatgatttcattgtcaagggcagctgcttctgcaatggccacgccgatcaatgcatacctgttcatggcttcagacctgtcaaggccccaggaacattccacatggtccatgggaagtgtatgtgtaagcacaacacagcaggcagccactgccagcactgtgccccgttatacaatgaccggccatgggaggcagctgatggcaaaacgggggctcccaacgagtgcagagcctgcaagtgtaatgggcatgctgatacctgtcacttcgacgttaatgtgtgggaggcatcagggaatcgtagtggtggtgtctgtgatgactgtcagcacaacacagaaggacagtattgccagaggtgcaagccaggcttctatcgtgacctgcggagacccttctcagctccagatgcttgcaaaccgtgttcctgccatccagtaggatcagctgtccttcctgccaactcagtgaccttctgcgaccccagcaatggtgactgcccttgcaagcctggggtggcagggcgacgttgtgacaggtgcatggtgggatactggggcttcggagactatggctgtcgaccatgtgactgtgcggggagctgtgaccctatcaccggagactgcatcagcagccacacagacatagactggtgtcatgaagttcctgac

SEQ ID NO: 406 - protein, 477 aa, Homo sapiens
MGSCARLLLLWGRTVVAAGLSGVAGVSSRCEKACNPRMGNLALGRKLWADTTCGQNATELYCFYSENTDLTCRQPKCDKCNAAYPHLAHLPSAMADSSFRFPRTWWQSAEDVHREKIQLDLEAEFYFTHLIVMFKSPRPAAMVLDRSQDFGKTWKPYKYFATNCSATFGLEDDVVKKGAICTPKYSSPFPCTGGEVIFKALSPPYDTENPYSAKVQEQLKITNLRVQLLKRQSYPCQRNDLNEEPQHFTHYAIYDFIVKGSCFCNGHADQCIPVHGFRPVKAPGTFHMVHGKCMCKHNTAGSHCQHCAPLYNDRPWEAADGKTGAPNECRACKCNGHADTCHFDVNVWEASGNRSGGVCDDCQHNTEGQYCQRCKPGFYRDLRRPFSAPDACKPCSCHPVGSAVLPANSVTFCDPSNGDCPCKPGVAGRRCDRCMVGYWGFGDYGCRPCDCAGSCDPITGDCISSHTDIDWCHEVPD

SEQ ID NO: 407 - DNA, 1431 bp, Homo sapiens
  CDS (1)..(1431)
atggggagctgcgcgcggctgctgctgctctggggctgcacggtggtggccgcaggactgagtggagtagctggagtgagttcccgctgtgaaaaagcctgcaaccctcggatgggaaatttggctttggggcgaaaactctgggcagacaccacctgcggtcagaatgctaccgaactgtactgcttctacagtgagaacacggatctgacttgtcggcagcccaaatgtgacaagtgcaatgctgcctatcctcacctggctcacctgccatctgccatggcagactcatccttccggtttcctcgcacatggtggcagtctgcggaggatgtgcacagagaaaagatccagttagacctggaagctgaattctacttcactcacctaattgtgatgttcaagtcccccaggccggctgccatggtgctggaccgctcccaggactttgggaaaacatggaagccttataagtactttgcgactaactgctccgctacatttggcctggaagatgatgttgtcaagaagggcgctatttgtactcctaaatactccagtccttttccatgcactggaggagaggttattttcaaagctttgtcaccaccatacgatacagagaacccttacagtgccaaagttcaggagcagctgaagatcaccaaccttcgcgtgcagctgctgaaacgacagtcttatccctgtcagagaaatgacctgaacgaagagcctcaacattttacacactatgcgatctatgatttcattgtcaagggcagctgcttctgcaatggccacgccgatcaatgcatacctgttcatggcttcagacctgtcaaggccccaggaacattccacatggtccatgggaagtgtatgtgtaagcacaacacagcaggcagccactgccagcactgtgccccgttatacaatgaccggccatgggaggcagctgatggcaaaacgggggctcccaacgagtgcagaacccgcaagtgtaatgggcatgctgatacctgtcacttcgacgttaatgtgtgggaggcatcagggaatcgtagtggtggtgtctgtgatgactgtcagcacaacacagaaggacagtattgccagaggtgcaagccaggcttctatcgtgacctgcggagacccttctcagctccagatgcttgcaaaccgtgttcctgccatccagtaggatcagctgtccttcctgccaactcagtgaccttctgcgaccccagcaatggtgactgcccttgcaagcctggggtggcagggcgacgttgtgacaggtgcatggtgggatactggggcttcggagactatggctgtcgaccatgtgactgtgcggggagctgtgaccctatcaccggagactgcatcagcagccacacagacatagactggtatcatgaagttcctgac

SEQ ID NO: 408 - protein, 477 aa, Homo sapiens
MGSCARLLLLWGCTVVAAGLSGVAGVSSRCEKACNPRMGNLALGRKLWADTTCGQNATELYCFYSENTDLTCRQPKCDKCNAAYPHLAHLPSAMADSSFRFPRTWWQSAEDVHREKIQLDLEAEFYFTHLIVMFKSPRPAAMVLDRSQDFGKTWKPYKYFATNCSATFGLEDDVVKKGAICTPKYSSPFPCTGGEVIFKALSPPYDTENPYSAKVQEQLKITNLRVQLLKRQSYPCQRNDLNEEPQHFTHYAIYDFIVKGSCFCNGHADQCIPVHGFRPVKAPGTFHMVHGKCMCKHNTAGSHCQHCAPLYNDRPWEAADGKTGAPNECRTRKCNGHADTCHFDVNVWEASGNRSGGVCDDCQHNTEGQYCQRCKPGFYRDLRRPFSAPDACKPCSCHPVGSAVLPANSVTFCDPSNGDCPCKPGVAGRRCDRCMVGYWGFGDYGCRPCDCAGSCDPITGDCISSHTDIDWYHEVPD

SEQ ID NO: 409 - DNA, 1431 bp, Homo sapiens
  CDS (1)..(1431)
atggggagctgcgcgcggctgctgctgctctggggctgcacggtggtggccgcaggactgagtggagtagctggagtgagttcccgctgtgaaaaagcctgcaaccctcggatgggaaatttggctttggggcgaaaactctgggcagacaccacctgcggtcagaatgctaccgaactgtactgcttctacagtgagaacacggatctgacttgtcggcagcccaaatgtgacaagtgcaatgctgcctatcctcacctggctcacctgccatctgccatggcagactcatccttccggtttcctcgcacatggtggcagtctgcggaggatgtgcacagagaaaagatccagttagacctggaagctgaattctacttcactcacctaattgtgatgttcaagtcccccaggccggctgccatggtgctggaccgctcccaggactttgggaaaacatggaagccttataagtactttgcgactaactgctccgctacatttggcctggaagatgatgttgtcaagaagggcgctatttgtactcctaaatactccagtccttttccatgcactggaggagaggttattttcaaagctttgtcaccaccatacgatacagagaacccttacagtgccaaagttcaggagcagctgaagatcaccaaccttcgcgtgcagctgctgaaacgacagtcttatccctgtcagagaaatgacctgaacgaagagcctcaacattttacacactatgcgatctatgatttcattgtcaagggcagctgcttctgcaatggccacgccgatcaatgcatacctgttcatggcttcagacctgtcaaggccccaggaacattccacatggtccatgggaagtgtatgtgtaagcacaacacagcaggcagccactgccagcactgtgccccgttatacaatgaccggccatgggaggcagctgatggcaaaacgggggctcccaacgagtgcagagcccgcaagtgtaatgggcatgctgatacctgtcacttcgacgttaatgtgtgggaggcatcagggaatcgtagtggtggtgtctgtgatgactgtcagcacaacacagaaggacagtattgccagaggtgcaagccaggcttctatcgtgacctgcggagacccttctcagctccagatgcttgcaaaccgtgttcctgccatccagtaggatcagctgtccttcctgccaactcagtgaccttctgcgaccccagcaatggtgactgcccttgcaagcctggggtggcagggcgacgttgtgacaggtgcatggtgggatactggggcttcggagactatggctgtcgaccatgtgactgtgcggggagctgtgaccctatcaccggagactgcatcagcagccacacagacatagactggtatcatgaagttcctgac

SEQ ID NO: 410 - protein, 477 aa, Homo sapiens
MGSCARLLLLWGCTVVAAGLSGVAGVSSRCEKACNPRMGNLALGRKLWADTTCGQNATELYCFYSENTDLTCRQPKCDKCNAAYPHLAHLPSAMADSSFRFPRTWWQSAEDVHREKIQLDLEAEFYFTHLIVMFKSPRPAAMVLDRSQDFGKTWKPYKYFATNCSATFGLEDDVVKKGAICTPKYSSPFPCTGGEVIFKALSPPYDTENPYSAKVQEQLKITNLRVQLLKRQSYPCQRNDLNEEPQHFTHYAIYDFIVKGSCFCNGHADQCIPVHGFRPVKAPGTFHMVHGKCMCKHNTAGSHCQHCAPLYNDRPWEAADGKTGAPNECRARKCNGHADTCHFDVNVWEASGNRSGGVCDDCQHNTEGQYCQRCKPGFYRDLRRPFSAPDACKPCSCHPVGSAVLPANSVTFCDPSNGDCPCKPGVAGRRCDRCMVGYWGFGDYGCRPCDCAGSCDPITGDCISSHTDIDWYHEVPD

SEQ ID NO: 411 - DNA, 1431 bp, Homo sapiens
  CDS (1)..(1431)
atggggagctgcgcgcggctgctgctgctctggggctgcacggtggtggccgcaggactgagtggagtagctggagtgagttcccgctgtgaaaaagcctgcaaccctcggatgggaaatttggctttggggcgaaaactctgggcagacaccacctgcggtcagaatgctaccgaactgtactgcttctacagtgagaacacggatctgacttgtcggcagcccaaatgtgacaagtgcaatgctgcctatcctcacctggctcacctgccatctgccatggcagactcatccttccggtttcctcgcacatggtggcagtctgcggaggatgtgcacagagaaaagatccagttagacctggaagctgaattctacttcactcacctaattgtgatgttcaagtcccccaggccggctgccatggtgctggaccgctcccaggactttgggaaaacatggaagccttataagtactttgcgactaactgctccgctacatttggcctggaagatgatgttgtcaagaagggcgctatttgtactcctaaatactccagtccttttccatgcactggaggagaggttattttcaaagctttgtcaccaccatacgatacagagaacccttacagtgccaaagttcaggagcagctgaagatcaccaaccttcgcgtgcagctgctgaaacgacagtcttatccctgtcagagaaatgacctgaacgaagagcctcaacattttacacactatgcgatctatgatttcattgtcaagggcagctgcttctgcaatggccacgccgatcaatgcatacctgttcatggcttcagacctgtcaaggccccaggaacattccacatggtccatgggaagtgtatgtgtaagcacaacacagcaggcagccactgccagcactgtgccccgttatacaatgaccggccatgggaggcagctgatggcaaaacgggggctcccaacgagtgcagagcccgcaagtgtaatgggcatgctgatacctgtcacttcgacgttaatgtgtgggaggcatcagggagtcgtagtggtggtgtctgtgatgactgtcagcacaacacagaaggacagtattgccagaggtgcaagccaggcttctatcgtgacctgcggagacccttctcagctccagatgcttgcaaaccgtgttcctgccatccagtaggatcagctgtccttcctgccaactcagtgaccttctgcgaccccagcaatggtgactgcccttgcaagcctggggtggcagggcgacgttgtgacaggtgcatggtgggatactggggcttcggagactatggctgtcgaccatgtgactgtgcggggagctgtgaccctatcaccggagactgcatcagcagccacacagacatagactggtgtcatgaagttcctgac

SEQ ID NO: 412 - protein, 477 aa, Homo sapiens
MGSCARLLLLWGCTVVAAGLSGVAGVSSRCEKACNPRMGNLALGRKLWADTTCGQNATELYCFYSENTDLTCRQPKCDKCNAAYPHLAHLPSAMADSSFRFPRTWWQSAEDVHREKIQLDLEAEFYFTHLIVMFKSPRPAAMVLDRSQDFGKTWKPYKYFATNCSATFGLEDDVVKKGAICTPKYSSPFPCTGGEVIFKALSPPYDTENPYSAKVQEQLKITNLRVQLLKRQSYPCQRNDLNEEPQHFTHYAIYDFIVKGSCFCNGHADQCIPVHGFRPVKAPGTFHMVHGKCMCKHNTAGSHCQHCAPLYNDRPWEAADGKTGAPNECRARKCNGHADTCHFDVNVWEASGSRSGGVCDDCQHNTEGQYCQRCKPGFYRDLRRPFSAPDACKPCSCHPVGSAVLPANSVTFCDPSNGDCPCKPGVAGRRCDRCMVGYWGFGDYGCRPCDCAGSCDPITGDCISSHTDIDWCHEVPD

SEQ ID NO: 413 - DNA, 1431 bp, Homo sapiens
  CDS (1)..(1431)
atggggagctgcgcgcggctgctgctgctctggggctgcacggtggtggccgcaggactgagtggagtagctggagtgagttcccgctgtgaaaaagcctgcaaccctcggatgggaaatttggctttggggcgaaaactctgggcagacaccacctgcggtcagaatgctaccgaactgtactgcttctacagtgagaacacggatctgacttgtcggcagcccaaatgtgacaagtgcaatgctgcctatcctcacctggctcacctgccatctgccatggcagactcatccttccggtttcctcgcacatggtggcagtctgcggaggatgtgcacagagaaaagatccagttagacctggaagctgaattctacttcactcacctaattgtgatgttcaagtcccccaggccggctgccatggtgctggaccgctcccaggactttgggaaaacatggaagccttataagtactttgcgactaactgctccgctacatttggcctggaagatgatgttgtcaagaagggcgctatttgtactcctaaatactccagtccttttccatgcactggaggagaggttattttcaaagctttgtcaccaccatacgatacagagaacccttacagtgccaaagttcaggagcagctgaagatcaccaaccttcgcgtgcagctgctgaaacgacagtcttatccctgtcagagaaatgacctgaacgaagagcctcaacattttacacactatgcgatctatgatttcattgtcaagggcagctgcttctgcaatggccacgccgatcaatgcatacctgttcatggcttcagacctgtcaaggccccaggaacattccacatggtccatgggaagtgtatgtgtaagcacaacacagcaggcagccactgccagcactgtgccccgttatacaatgaccggccatgggaggcagctgatggcaaaacgggggctcccaacgagtgcagaacctgcaagtgtaatgggcatgctgatacctgtcacttcgacgttaatgtgtgggaggcatcagggaatcgtagtggtggtgtctgtgatgactgtcagcacaacacagaaggacagtattgccagaggtgcaagccaggcttctatcgtgacctgcggagacccttctcagctccagatgcttgcaaaccgtgttcctgccatccagtaggatcagctgtccttcctgccaactcagtgaccttctgcgaccccagcaatggtgactgcccttgcaagcctggggtggcagggcgacgttgtgacaggtgcatggtgggatactggggcttcggagactatggctgtcgaccatgtgactgtgcggggagctgtgaccctatcaccggagactgcatcagcagccacacagacatagactggtatcatgaagttcctgac

SEQ ID NO: 414 - protein, 477 aa, Homo sapiens
MGSCARLLLLWGCTVVAAGLSGVAGVSSRCEKACNPRMGNLALGRKLWADTTCGQNATELYCFYSENTDLTCRQPKCDKCNAAYPHLAHLPSAMADSSFRFPRTWWQSAEDVHREKIQLDLEAEFYFTHLIVMFKSPRPAAMVLDRSQDFGKTWKPYKYFATNCSATFGLEDDVVKKGAICTPKYSSPFPCTGGEVIFKALSPPYDTENPYSAKVQEQLKITNLRVQLLKRQSYPCQRNDLNEEPQHFTHYAIYDFIVKGSCFCNGHADQCIPVHGFRPVKAPGTFHMVHGKCMCKHNTAGSHCQHCAPLYNDRPWEAADGKTGAPNECRTCKCNGHADTCHFDVNVWEASGNRSGGVCDDCQHNTEGQYCQRCKPGFYRDLRRPFSAPDACKPCSCHPVGSAVLPANSVTFCDPSNGDCPCKPGVAGRRCDRCMVGYWGFGDYGCRPCDCAGSCDPITGDCISSHTDIDWYHEVPD

SEQ ID NO: 415 - DNA, 1431 bp, Homo sapiens
  CDS (1)..(1431)
atggggagctgcgcgcggctgctgctgctctggggctgcacggtggtggccgcaggactgagtggagtagctggagtgagttcccgctgtgaaaaagcctgcaaccctcggatgggaaatttggctttggggcgaaaactctgggcagacaccacctgcggtcagaatgctaccgaactgtactgcttctacagtgagaacacggatctgacttgtcggcagcccaaatgtgacaagtgcaatgctgcctatcctcacctggctcacctgccatctgccatggcagactcatccttccggtttcctcgcacatggtggcagtctgcggaggatgtgcacagagaaaagatccagttagacctggaagctgaattctacttcactcacctaattgtgatgttcaagtcccccaggccggctgccatggtgctggaccgctcccaggactttgggaaaacatggaagccttataagtactttgcgactaactgctccgctacatttggcctggaagatgatgttgtcaagaagggcgctatttgtactcctaaatactccagtccttttccatgcactggaggagaggttattttcaaagctttgtcaccaccatacgatacagagaacccttacagtgccaaagttcaggagcagctgaagatcaccaaccttcgcgtgcagctgctgaaacgacagtcttatccctgtcagagaaatgacctgaacgaagagcctcaacattttacacactatgcgatctatgatttcattgtcaagggcagctgcttctgcaatggccacgccgatcaatgcatacctgttcatggcttcagacctgtcaaggccccaggaacattccacatggtccatgggaagtgtatgtgtaagcacaacacagcaggcagccactgccagcactgtgccccgttatacaatgaccggccatgggaggcagctgatggcaaaacgggggctcccaacgagtgcagaacctgcaagtgtaatgggcatgctgatacctgtcacttcgacgttaatgtgtgggaggcatcagggagtcgtagtggtggtgtctgtgatgactgtcagcacaacacagaaggacagtattgccagaggtgcaagccaggcttctatcgtgacctgcggagacccttctcagctccagatgcttgcaaaccgtgttcctgccatccagtaggatcagctgtccttcctgccaactcagtgaccttctgcgaccccagcaatggtgactgcccttgcaagcctggggtggcagggcgacgttgtgacaggtgcatggtgggatactggggcttcggagactatggctgtcgaccatgtgactgtgcggggagctgtgaccctatcaccggagactgcatcagcagccacacagacatagactggtgtcatgaagttcctgac

SEQ ID NO: 416 - protein, 477 aa, Homo sapiens
MGSCARLLLLWGCTVVAAGLSGVAGVSSRCEKACNPRMGNLALGRKLWADTTCGQNATELYCFYSENTDLTCRQPKCDKCNAAYPHLAHLPSAMADSSFRFPRTWWQSAEDVHREKIQLDLEAEFYFTHLIVMFKSPRPAAMVLDRSQDFGKTWKPYKYFATNCSATFGLEDDVVKKGAICTPKYSSPFPCTGGEVIFKALSPPYDTENPYSAKVQEQLKITNLRVQLLKRQSYPCQRNDLNEEPQHFTHYAIYDFIVKGSCFCNGHADQCIPVHGFRPVKAPGTFHMVHGKCMCKHNTAGSHCQHCAPLYNDRPWEAADGKTGAPNECRTCKCNGHADTCHFDVNVWEASGSRSGGVCDDCQHNTEGQYCQRCKPGFYRDLRRPFSAPDACKPCSCHPVGSAVLPANSVTFCDPSNGDCPCKPGVAGRRCDRCMVGYWGFGDYGCRPCDCAGSCDPITGDCISSHTDIDWCHEVPD

SEQ ID NO: 417 - DNA, 1431 bp, Homo sapiens
  CDS (1)..(1431)
atggggagctgcgcgcggctgctgctgctctggggctgcacggtggtggccgcaggactgagtggagtagctggagtgagttcccgctgtgaaaaagcctgcaaccctcggatgggaaatttggctttggggcgaaaactctgggcagacaccacctgcggtcagaatgctaccgaactgtactgcttctacagtgagaacacggatctgacttgtcggcagcccaaatgtgacaagtgcaatgctgcctatcctcacctggctcacctgccatctgccatggcagactcatccttccggtttcctcgcacatggtggcagtctgcggaggatgtgcacagagaaaagatccagttagacctggaagctgaattctacttcactcacctaattgtgatgttcaagtcccccaggccggctgccatggtgctggaccgctcccaggactttgggaaaacatggaagccttataagtactttgcgactaactgctccgctacatttggcctggaagatgatgttgtcaagaagggcgctatttgtactcctaaatactccagtccttttccatgcactggaggagaggttattttcaaagctttgtcaccaccatacgatacagagaacccttacagtgccaaagttcaggagcagctgaagatcaccaaccttcgcgtgcagctgctgaaacgacagtcttatccctgtcagagaaatgacctgaacgaagagcctcaacattttacacactatgcgatctatgatttcattgtcaagggcagctgcttctgcaatggccacgccgatcaatgcatacctgttcatggcttcagacctgtcaaggccccaggaacattccacatggtccatgggaagtgtatgtgtaagcacaacacagcaggcagccactgccagcactgtgccccgttatacaatgaccggccatgggaggcagctgatggcaaaacgggggctcccaacgagtgcagaacccgcaagtgtaatgggcatgctgatacctgtcacttcgacgttaatgtgtgggaggcatcagggaatcgtagtggtggtgtctgtgatgactgtcagcacaacacagaaggacagtattgccagaggtgcaagccaggcttctatcgtgacctgcggagacccttctcagctccagatgcttgcaaaccgtgttcctgccatccagtaggatcagctgtccttcctgccaactcagtgaccttctgcgaccccagcaatggtgactgcccttgcaagcctggggtggcagggcgacgttgtgacaggtgcatggtgggatactggggcttcggagactatggctgtcgaccatgtgactgtgcggggagctgtgaccctatcaccggagactgcatcagcagccacacagacatagactggtgtcatgaagttcctgac

SEQ ID NO: 418 - protein, 477 aa, Homo sapiens
MGSCARLLLLWGCTVVAAGLSGVAGVSSRCEKACNPRMGNLALGRKLWADTTCGQNATELYCFYSENTDLTCRQPKCDKCNAAYPHLAHLPSAMADSSFRFPRTWWQSAEDVHREKIQLDLEAEFYFTHLIVMFKSPRPAAMVLDRSQDFGKTWKPYKYFATNCSATFGLEDDVVKKGAICTPKYSSPFPCTGGEVIFKALSPPYDTENPYSAKVQEQLKITNLRVQLLKRQSYPCQRNDLNEEPQHFTHYAIYDFIVKGSCFCNGHADQCIPVHGFRPVKAPGTFHMVHGKCMCKHNTAGSHCQHCAPLYNDRPWEAADGKTGAPNECRTRKCNGHADTCHFDVNVWEASGNRSGGVCDDCQHNTEGQYCQRCKPGFYRDLRRPFSAPDACKPCSCHPVGSAVLPANSVTFCDPSNGDCPCKPGVAGRRCDRCMVGYWGFGDYGCRPCDCAGSCDPITGDCISSHTDIDWCHEVPD

SEQ ID NO: 419 - DNA, 1431 bp, Homo sapiens
  CDS (1)..(1431)
atggggagctgcgcgcggctgctgctgctctggggctgcacggtggtggccgcaggactgagtggagtagctggagtgagttcccgctgtgaaaaagcctgcaaccctcggatgggaaatttggctttggggcgaaaactctgggcagacaccacctgcggtcagaatgctaccgaactgtactgcttctacagtgagaacacggatctgacttgtcggcagcccaaatgtgacaagtgcaatgctgcctatcctcacctggctcacctgccatctgccatggcagactcatccttccggtttcctcgcacatggtggcagtctgcggaggatgtgcacagagaaaagatccagttagacctggaagctgaattctacttcactcacctaattgtgatgttcaagtcccccaggccggctgccatggtgctggaccgctcccaggactttgggaaaacatggaagccttataagtactttgcgactaactgctccgctacatttggcctggaagatgatgttgtcaagaagggcgctatttgtactcctaaatactccagtccttttccatgcactggaggagaggttattttcaaagctttgtcaccaccatacgatacagagaacccttacagtgccaaagttcaggagcagctgaagatcaccaaccttcgcgtgcagctgctgaaacgacagtcttatccctgtcagagaaatgacctgaacgaagagcctcaacattttacacactatgcgatctatgatttcattgtcaagggcagctgcttctgcaatggccacgccgatcaatgcatacctgttcatggcttcagacctgtcaaggccccaggaacattccacatggtccatgggaagtgtatgtgtaagcacaacacagcaggcagccactgccagcactgtgccccgttatacaatgaccggccatgggaggcagctgatggcaaaacgggggctcccaacgagtgcagagcctgcaagtgtaatgggcatgctgatacctgtcacttcgacgttaatgtgtgggaggcatcagggaatcgtagtggtggtgtctgtgatgactgtcagcacaacacagaaggacagtattgccagaggtgcaagccaggcttctatcgtgacctgcggagacccttctcagctccagatgcttgcaaaccgtgttcctgccatccagtaggatcagctgtccttcctgccaactcagtgaccttctgcgaccccagcaatggtgactgcccttgcaagcctggggtggcagggcgacgttgtgacaggtgcatggtgggatactggggcttcggagactatggctgtcgaccatgtgactgtgcggggagctgtgaccctatcaccggagactgcatcagcagccacacagacatagactggtatcatgaagttcctgac

SEQ ID NO: 420 - protein, 477 aa, Homo sapiens
MGSCARLLLLWGCTVVAAGLSGVAGVSSRCEKACNPRMGNLALGRKLWADTTCGQNATELYCFYSENTDLTCRQPKCDKCNAAYPHLAHLPSAMADSSFRFPRTWWQSAEDVHREKIQLDLEAEFYFTHLIVMFKSPRPAAMVLDRSQDFGKTWKPYKYFATNCSATFGLEDDVVKKGAICTPKYSSPFPCTGGEVIFKALSPPYDTENPYSAKVQEQLKITNLRVQLLKRQSYPCQRNDLNEEPQHFTHYAIYDFIVKGSCFCNGHADQCIPVHGFRPVKAPGTFHMVHGKCMCKHNTAGSHCQHCAPLYNDRPWEAADGKTGAPNECRACKCNGHADTCHFDVNVWEASGNRSGGVCDDCQHNTEGQYCQRCKPGFYRDLRRPFSAPDACKPCSCHPVGSAVLPANSVTFCDPSNGDCPCKPGVAGRRCDRCMVGYWGFGDYGCRPCDCAGSCDPITGDCISSHTDIDWYHEVPD

SEQ ID NO: 421 - DNA, 1431 bp, Homo sapiens
  CDS (1)..(1431)
atggggagctgcgcgcggctgctgctgctctggggctgcacggtggtggccgcaggactgagtggagtagctggagtgagttcccgctgtgaaaaagcctgcaaccctcggatgggaaatttggctttggggcgaaaactctgggcagacaccacctgcggtcagaatgctaccgaactgtactgcttctacagtgagaacacggatctgacttgtcggcagcccaaatgtgacaagtgcaatgctgcctatcctcacctggctcacctgccatctgccatggcagactcatccttccggtttcctcgcacatggtggcagtctgcggaggatgtgcacagagaaaagatccagttagacctggaagctgaattctacttcactcacctaattgtgatgttcaagtcccccaggccggctgccatggtgctggaccgctcccaggactttgggaaaacatggaagccttataagtactttgcgactaactgctccgctacatttggcctggaagatgatgttgtcaagaagggcgctatttgtactcctaaatactccagtccttttccatgcactggaggagaggttattttcaaagctttgtcaccaccatacgatacagagaacccttacagtgccaaagttcaggagcagctgaagatcaccaaccttcgcgtgcagctgctgaaacgacagtcttatccctgtcagagaaatgacctgaacgaagagcctcaacattttacacactatgcgatctatgatttcattgtcaagggcagctgcttctgcaatggccacgccgatcaatgcatacctgttcatggcttcagacctgtcaaggccccaggaacattccacatggtccatgggaagtgtatgtgtaagcacaacacagcaggcagccactgccagcactgtgccccgttatacaatgaccggccatgggaggcagctgatggcaaaacgggggctcccaacgagtgcagagcctgcaagtgtaatgggcatgctgatacctgtcacttcgacgttaatgtgtgggaggcatcagggagtcgtagtggtggtgtctgtgatgactgtcagcacaacacagaaggacagtattgccagaggtgcaagccaggcttctatcgtgacctgcggagacccttctcagctccagatgcttgcaaaccgtgttcctgccatccagtaggatcagctgtccttcctgccaactcagtgaccttctgcgaccccagcaatggtgactgcccttgcaagcctggggtggcagggcgacgttgtgacaggtgcatggtgggatactggggcttcggagactatggctgtcgaccatgtgactgtgcggggagctgtgaccctatcaccggagactgcatcagcagccacacagacatagactggtgtcatgaagttcctgac

SEQ ID NO: 422 - protein, 477 aa, Homo sapiens
MGSCARLLLLWGCTVVAAGLSGVAGVSSRCEKACNPRMGNLALGRKLWADTTCGQNATELYCFYSENTDLTCRQPKCDKCNAAYPHLAHLPSAMADSSFRFPRTWWQSAEDVHREKIQLDLEAEFYFTHLIVMFKSPRPAAMVLDRSQDFGKTWKPYKYFATNCSATFGLEDDVVKKGAICTPKYSSPFPCTGGEVIFKALSPPYDTENPYSAKVQEQLKITNLRVQLLKRQSYPCQRNDLNEEPQHFTHYAIYDFIVKGSCFCNGHADQCIPVHGFRPVKAPGTFHMVHGKCMCKHNTAGSHCQHCAPLYNDRPWEAADGKTGAPNECRACKCNGHADTCHFDVNVWEASGSRSGGVCDDCQHNTEGQYCQRCKPGFYRDLRRPFSAPDACKPCSCHPVGSAVLPANSVTFCDPSNGDCPCKPGVAGRRCDRCMVGYWGFGDYGCRPCDCAGSCDPITGDCISSHTDIDWCHEVPD

SEQ ID NO: 423 - DNA, 1431 bp, Homo sapiens
  CDS (1)..(1431)
atggggagctgcgcgcggctgctgctgctctggggctgcacggtggtggccgcaggactgagtggagtagctggagtgagttcccgctgtgaaaaagcctgcaaccctcggatgggaaatttggctttggggcgaaaactctgggcagacaccacctgcggtcagaatgctaccgaactgtactgcttctacagtgagaacacggatctgacttgtcggcagcccaaatgtgacaagtgcaatgctgcctatcctcacctggctcacctgccatctgccatggcagactcatccttccggtttcctcgcacatggtggcagtctgcggaggatgtgcacagagaaaagatccagttagacctggaagctgaattctacttcactcacctaattgtgatgttcaagtcccccaggccggctgccatggtgctggaccgctcccaggactttgggaaaacatggaagccttataagtactttgcgactaactgctccgctacatttggcctggaagatgatgttgtcaagaagggcgctatttgtactcctaaatactccagtccttttccatgcactggaggagaggttattttcaaagctttgtcaccaccatacgatacagagaacccttacagtgccaaagttcaggagcagctgaagatcaccaaccttcgcgtgcagctgctgaaacgacagtcttatccctgtcagagaaatgacctgaacgaagagcctcaacattttacacactatgcgatctatgatttcattgtcaagggcagctgcttctgcaatggccacgccgatcaatgcatacctgttcatggcttcagacctgtcaaggccccaggaacattccacatggtccatgggaagtgtatgtgtaagcacaacacagcaggcagccactgccagcactgtgccccgttatacaatgaccggccatgggaggcagctgatggcaaaacgggggctcccaacgagtgcagagcccgcaagtgtaatgggcatgctgatacctgtcacttcgacgttaatgtgtgggaggcatcagggaatcgtagtggtggtgtctgtgatgactgtcagcacaacacagaaggacagtattgccagaggtgcaagccaggcttctatcgtgacctgcggagacccttctcagctccagatgcttgcaaaccgtgttcctgccatccagtaggatcagctgtccttcctgccaactcagtgaccttctgcgaccccagcaatggtgactgcccttgcaagcctggggtggcagggcgacgttgtgacaggtgcatggtgggatactggggcttcggagactatggctgtcgaccatgtgactgtgcggggagctgtgaccctatcaccggagactgcatcagcagccacacagacatagactggtgtcatgaagttcctgac

SEQ ID NO: 424 - protein, 477 aa, Homo sapiens
MGSCARLLLLWGCTVVAAGLSGVAGVSSRCEKACNPRMGNLALGRKLWADTTCGQNATELYCFYSENTDLTCRQPKCDKCNAAYPHLAHLPSAMADSSFRFPRTWWQSAEDVHREKIQLDLEAEFYFTHLIVMFKSPRPAAMVLDRSQDFGKTWKPYKYFATNCSATFGLEDDVVKKGAICTPKYSSPFPCTGGEVIFKALSPPYDTENPYSAKVQEQLKITNLRVQLLKRQSYPCQRNDLNEEPQHFTHYAIYDFIVKGSCFCNGHADQCIPVHGFRPVKAPGTFHMVHGKCMCKHNTAGSHCQHCAPLYNDRPWEAADGKTGAPNECRARKCNGHADTCHFDVNVWEASGNRSGGVCDDCQHNTEGQYCQRCKPGFYRDLRRPFSAPDACKPCSCHPVGSAVLPANSVTFCDPSNGDCPCKPGVAGRRCDRCMVGYWGFGDYGCRPCDCAGSCDPITGDCISSHTDIDWCHEVPD

SEQ ID NO: 425 - DNA, 1431 bp, Homo sapiens
  CDS (1)..(1431)
atggggagctgcgcgcggctgctgctgctctggggctgcacggtggtggccgcaggactgagtggagtagctggagtgagttcccgctgtgaaaaagcctgcaaccctcggatgggaaatttggctttggggcgaaaactctgggcagacaccacctgcggtcagaatgctaccgaactgtactgcttctacagtgagaacacggatctgacttgtcggcagcccaaatgtgacaagtgcaatgctgcctatcctcacctggctcacctgccatctgccatggcagactcatccttccggtttcctcgcacatggtggcagtctgcggaggatgtgcacagagaaaagatccagttagacctggaagctgaattctacttcactcacctaattgtgatgttcaagtcccccaggccggctgccatggtgctggaccgctcccaggactttgggaaaacatggaagccttataagtactttgcgactaactgctccgctacatttggcctggaagatgatgttgtcaagaagggcgctatttgtactcctaaatactccagtccttttccatgcactggaggagaggttattttcaaagctttgtcaccaccatacgatacagagaacccttacagtgccaaagttcaggagcagctgaagatcaccaaccttcgcgtgcagctgctgaaacgacagtcttatccctgtcagagaaatgacctgaacgaagagcctcaacattttacacactatgcgatctatgatttcattgtcaagggcagctgcttctgcaatggccacgccgatcaatgcatacctgttcatggcttcagacctgtcaaggccccaggaacattccacatggtccatgggaagtgtatgtgtaagcacaacacagcaggcagccactgccagcactgtgccccgttatacaatgaccggccatgggaggcagctgatggcaaaacgggggctcccaacgagtgcagaacctgcaagtgtaatgggcatgctgatacctgtcacttcgacgttaatgtgtgggaggcatcagggaatcgtagtggtggtgtctgtgatgactgtcagcacaacacagaaggacagtattgccagaggtgcaagccaggcttctatcgtgacctgcggagacccttctcagctccagatgcttgcaaaccgtgttcctgccatccagtaggatcagctgtccttcctgccaactcagtgaccttctgcgaccccagcaatggtgactgcccttgcaagcctggggtggcagggcgacgttgtgacaggtgcatggtgggatactggggcttcggagactatggctgtcgaccatgtgactgtgcggggagctgtgaccctatcaccggagactgcatcagcagccacacagacatagactggtgtcatgaagttcctgac

SEQ ID NO: 426 - protein, 477 aa, Homo sapiens
MGSCARLLLLWGCTVVAAGLSGVAGVSSRCEKACNPRMGNLALGRKLWADTTCGQNATELYCFYSENTDLTCRQPKCDKCNAAYPHLAHLPSAMADSSFRFPRTWWQSAEDVHREKIQLDLEAEFYFTHLIVMFKSPRPAAMVLDRSQDFGKTWKPYKYFATNCSATFGLEDDVVKKGAICTPKYSSPFPCTGGEVIFKALSPPYDTENPYSAKVQEQLKITNLRVQLLKRQSYPCQRNDLNEEPQHFTHYAIYDFIVKGSCFCNGHADQCIPVHGFRPVKAPGTFHMVHGKCMCKHNTAGSHCQHCAPLYNDRPWEAADGKTGAPNECRTCKCNGHADTCHFDVNVWEASGNRSGGVCDDCQHNTEGQYCQRCKPGFYRDLRRPFSAPDACKPCSCHPVGSAVLPANSVTFCDPSNGDCPCKPGVAGRRCDRCMVGYWGFGDYGCRPCDCAGSCDPITGDCISSHTDIDWCHEVPD

SEQ ID NO: 427 - DNA, 1431 bp, Homo sapiens
  CDS (1)..(1431)
atggggagctgcgcgcggctgctgctgctctggggctgcacggtggtggccgcaggactgagtggagtagctggagtgagttcccgctgtgaaaaagcctgcaaccctcggatgggaaatttggctttggggcgaaaactctgggcagacaccacctgcggtcagaatgctaccgaactgtactgcttctacagtgagaacacggatctgacttgtcggcagcccaaatgtgacaagtgcaatgctgcctatcctcacctggctcacctgccatctgccatggcagactcatccttccggtttcctcgcacatggtggcagtctgcggaggatgtgcacagagaaaagatccagttagacctggaagctgaattctacttcactcacctaattgtgatgttcaagtcccccaggccggctgccatggtgctggaccgctcccaggactttgggaaaacatggaagccttataagtactttgcgactaactgctccgctacatttggcctggaagatgatgttgtcaagaagggcgctatttgtactcctaaatactccagtccttttccatgcactggaggagaggttattttcaaagctttgtcaccaccatacgatacagagaacccttacagtgccaaagttcaggagcagctgaagatcaccaaccttcgcgtgcagctgctgaaacgacagtcttatccctgtcagagaaatgacctgaacgaagagcctcaacattttacacactatgcgatctatgatttcattgtcaagggcagctgcttctgcaatggccacgccgatcaatgcatacctgttcatggcttcagacctgtcaaggccccaggaacattccacatggtccatgggaagtgtatgtgtaagcacaacacagcaggcagccactgccagcactgtgccccgttatacaatgaccggccatgggaggcagctgatggcaaaacgggggctcccaacgagtgcagagcctgcaagtgtaatgggcatgctgatacctgtcacttcgacgttaatgtgtgggaggcatcagggaatcgtagtggtggtgtctgtgatgactgtcagcacaacacagaaggacagtattgccagaggtgcaagccaggcttctatcgtgacctgcggagacccttctcagctccagatgcttgcaaaccgtgttcctgccatccagtaggatcagctgtccttcctgccaactcagtgaccttctgcgaccccagcaatggtgactgcccttgcaagcctggggtggcagggcgacgttgtgacaggtgcatggtgggatactggggcttcggagactatggctgtcgaccatgtgactgtgcggggagctgtgaccctatcaccggagactgcatcagcagccacacagacatagactggtgtcatgaagttcctgac

SEQ ID NO: 428 - protein, 477 aa, Homo sapiens
MGSCARLLLLWGCTVVAAGLSGVAGVSSRCEKACNPRMGNLALGRKLWADTTCGQNATELYCFYSENTDLTCRQPKCDKCNAAYPHLAHLPSAMADSSFRFPRTWWQSAEDVHREKIQLDLEAEFYFTHLIVMFKSPRPAAMVLDRSQDFGKTWKPYKYFATNCSATFGLEDDVVKKGAICTPKYSSPFPCTGGEVIFKALSPPYDTENPYSAKVQEQLKITNLRVQLLKRQSYPCQRNDLNEEPQHFTHYAIYDFIVKGSCFCNGHADQCIPVHGFRPVKAPGTFHMVHGKCMCKHNTAGSHCQHCAPLYNDRPWEAADGKTGAPNECRACKCNGHADTCHFDVNVWEASGNRSGGVCDDCQHNTEGQYCQRCKPGFYRDLRRPFSAPDACKPCSCHPVGSAVLPANSVTFCDPSNGDCPCKPGVAGRRCDRCMVGYWGFGDYGCRPCDCAGSCDPITGDCISSHTDIDWCHEVPD

SEQ ID NO: 429 - DNA, 1431 bp, Homo sapiens
  CDS (1)..(1431)
atggggagctgcgcgcggctgctgctgctctggggctgcacggtggtggccgcaggactgagtggagtagctggagtgagttcccgctgtgaaaaagcctgcaaccctcggatgggaaatttggctttggggcgaaaactctgggcagacaccacctgcggtcagaatgctaccgaactgtactgcttctacagtgagaacaaggatctgacttgtcggcagcccaaatgtgacaagtgcaatgctgcctatcctcacctggctcacctgccatctgccatggcagactcatccttccggtttcctcgcacatggtggcagtctgcggaggatgtgcacagagaaaagatccagttagacctggaagctgaattctacttcactcacctaattgtgatgttcaagtcccccaggccggctgccatggtgctggaccgctcccaggactttgggaaaacatggaagccttataagtactttgcgactaactgctccgctacatttggcctggaagatgatgttgtcaagaagggcgctatttgtacttctaaatactccagtccttttccatgcactggaggagaggttattttcaaagctttgtcaccaccacacgatacagagaacccttacagtgccaaagttcaggagcagctgaagatcaccaaccttcgcgtgcagctgctgaaacgacagtcttgtccctgtcagagaaatgacctgaacgaagagcctcaacattttacacactatgcgatctatgatttcattgtcaagggcagctgcttctgcaatggccacgccgatcaatgcatacctgttcatggcttcagacctgtcaaggccccaggaacattccacatggtccatgggaagtgtatgtgtaagcacaacacagcaggcagccactgccagcactgtgccccgttatacaatgaccggccatgggaggcagctgatggcaaaacgggggctcccaacgagtgcagaacctgcaagtgtaatgggcatgctgatacctgtcacttcgacgttaatgtgtgggaggcatcagggaatcgtagtggtggtgtctgtgatgactgtcagcacaacacagaaggacagtattgccagaggtgcaagccaggcttctatcgtgacctgcggagacccttctcagctccagatgcttgcaaaccgtgttcctgccatccagtaggatcagctgtccttcctgccaactcagtgaccttctgcgaccccagcaatggtgactgcccttgcaagcctggggtggcagggcgacgttgtgacaggtgcatggtgggatactggggcttcggagactatggctgtcgaccatgtgactgtgcggggagctgtgaccctatcaccggagactgcatcagcagccacacagacatagactggtgtcatgaagttcctgac

SEQ ID NO: 430 - protein, 477 aa, Homo sapiens
MGSCARLLLLWGCTVVAAGLSGVAGVSSRCEKACNPRMGNLALGRKLWADTTCGQNATELYCFYSENKDLTCRQPKCDKCNAAYPHLAHLPSAMADSSFRFPRTWWQSAEDVHREKIQLDLEAEFYFTHLIVMFKSPRPAAMVLDRSQDFGKTWKPYKYFATNCSATFGLEDDVVKKGAICTSKYSSPFPCTGGEVIFKALSPPHDTENPYSAKVQEQLKITNLRVQLLKRQSCPCQRNDLNEEPQHFTHYAIYDFIVKGSCFCNGHADQCIPVHGFRPVKAPGTFHMVHGKCMCKHNTAGSHCQHCAPLYNDRPWEAADGKTGAPNECRTCKCNGHADTCHFDVNVWEASGNRSGGVCDDCQHNTEGQYCQRCKPGFYRDLRRPFSAPDACKPCSCHPVGSAVLPANSVTFCDPSNGDCPCKPGVAGRRCDRCMVGYWGFGDYGCRPCDCAGSCDPITGDCISSHTDIDWCHEVPD

SEQ ID NO: 431 - DNA, 1431 bp, Homo sapiens
  CDS (1)..(1431)
atggggagctgcgcgcggctgctgctgctctggggctgcacggtggtggccgcaggactgagtggagtagctggagtgagttcccgctgtgaaaaagcctgcaaccctcggatgggaaatttggctttggggcgaaaactctgggcagacaccacctgcggtcagaatgctaccgaactgtactgcttctacagtgagaacaaggatctgacttgtcggcagcccaaatgtgacaagtgcaatgctgcctatcctcacctggctcacctgccatctgccatggcagactcatccttccggtttcctcgcacatggtggcagtctgcggaggatgtgcacagagaaaagatccagttagacctggaagctgaattctacttcactcacctaattgtgatgttcaagtcccccaggccggctgccatggtgctggaccgctcccaggactttgggaaaacatggaagccttataagtactttgcgactaactgctccgctacatttggcctggaagatgatgttgtcaagaagggcgctatttgtacttctaaatactccagtccttttccatgcactggaggagaggttattttcaaagctttgtcaccaccacacgatacagagaacccttacagtgccaaagttcaggagcagctgaagatcaccaaccttcgcgtgcagctgctgaaacgacagtcttgtccctgtcagagaaatgacctgaacgaagagcctcaacattttacacactatgcgatctatgatttcattgtcaagggcagctgcttctgcaatggccacgccgatcaatgcatacctgttcatggcttcagacctgtcaaggccccaggaacattccacatggtccatgggaagtgtatgtgtaagcacaacacagcaggcagccactgccagcactgtgccccgttatacaatgaccggccatgggaggcagctgatggcaaaacgggggctcccaacgagtgcagagcccgcaagtgtaatgggcatgctgatacctgtcacttcgacgttaatgtgtgggaggcatcagggaatcgtagtggtggtgtctgtgatgactgtcagcacaacacagaaggacagtattgccagaggtgcaagccaggcttctatcgtgacctgcggagacccttctcagctccagatgcttgcaaaccgtgttcctgccatccagtaggatcagctgtccttcctgccaactcagtgaccttctgcgaccccagcaatggtgactgcccttgcaagcctggggtggcagggcgacgttgtgacaggtgcatggtgggatactggggcttcggagactatggctgtcgaccatgtgactgtgcggggagctgtgaccctatcaccggagactgcatcagcagccacacagacatagactggtgtcatgaagttcctgac

SEQ ID NO: 432 - protein, 477 aa, Homo sapiens
MGSCARLLLLWGCTVVAAGLSGVAGVSSRCEKACNPRMGNLALGRKLWADTTCGQNATELYCFYSENKDLTCRQPKCDKCNAAYPHLAHLPSAMADSSFRFPRTWWQSAEDVHREKIQLDLEAEFYFTHLIVMFKSPRPAAMVLDRSQDFGKTWKPYKYFATNCSATFGLEDDVVKKGAICTSKYSSPFPCTGGEVIFKALSPPHDTENPYSAKVQEQLKITNLRVQLLKRQSCPCQRNDLNEEPQHFTHYAIYDFIVKGSCFCNGHADQCIPVHGFRPVKAPGTFHMVHGKCMCKHNTAGSHCQHCAPLYNDRPWEAADGKTGAPNECRARKCNGHADTCHFDVNVWEASGNRSGGVCDDCQHNTEGQYCQRCKPGFYRDLRRPFSAPDACKPCSCHPVGSAVLPANSVTFCDPSNGDCPCKPGVAGRRCDRCMVGYWGFGDYGCRPCDCAGSCDPITGDCISSHTDIDWCHEVPD

SEQ ID NO: 433 - DNA, 1431 bp, Homo sapiens
  CDS (1)..(1431)
atggggagctgcgcgcggctgctgctgctctggggctgcacggtggtggccgcaggactgagtggagtagctggagtgagttcccgctgtgaaaaagcctgcaaccctcggatgggaaatttggctttggggcgaaaactctgggcagacaccacctgcggtcagaatgctaccgaactgtactgcttctacagtgagaacaaggatctgacttgtcggcagcccaaatgtgacaagtgcaatgctgcctatcctcacctggctcacctgccatctgccatggcagactcatccttccggtttcctcgcacatggtggcagtctgcggaggatgtgcacagagaaaagatccagttagacctggaagctgaattctacttcactcacctaattgtgatgttcaagtcccccaggccggctgccatggtgctggaccgctcccaggactttgggaaaacatggaagccttataagtactttgcgactaactgctccgctacatttggcctggaagatgatgttgtcaagaagggcgctatttgtacttctaaatactccagtccttttccatgcactggaggagaggttattttcaaagctttgtcaccaccacacgatacagagaacccttacagtgccaaagttcaggagcagctgaagatcaccaaccttcgcgtgcagctgctgaaacgacagtcttgtccctgtcagagaaatgacctgaacgaagagcctcaacattttacacactatgcgatctatgatttcattgtcaagggcagctgcttctgcaatggccacgccgatcaatgcatacctgttcatggcttcagacctgtcaaggccccaggaacattccacatggtccatgggaagtgtatgtgtaagcacaacacagcaggcagccactgccagcactgtgccccgttatacaatgaccggccatgggaggcagctgatggcaaaacgggggctcccaacgagtgcagagcctgcaagtgtaatgggcatgctgatacctgtcacttcgacgttaatgtgtgggaggcatcagggagtcgtagtggtggtgtctgtgatgactgtcagcacaacacagaaggacagtattgccagaggtgcaagccaggcttctatcgtgacctgcggagacccttctcagctccagatgcttgcaaaccgtgttcctgccatccagtaggatcagctgtccttcctgccaactcagtgaccttctgcgaccccagcaatggtgactgcccttgcaagcctggggtggcagggcgacgttgtgacaggtgcatggtgggatactggggcttcggagactatggctgtcgaccatgtgactgtgcggggagctgtgaccctatcaccggagactgcatcagcagccacacagacatagactggtgtcatgaagttcctgac

SEQ ID NO: 434 - protein, 477 aa, Homo sapiens
MGSCARLLLLWGCTVVAAGLSGVAGVSSRCEKACNPRMGNLALGRKLWADTTCGQNATELYCFYSENKDLTCRQPKCDKCNAAYPHLAHLPSAMADSSFRFPRTWWQSAEDVHREKIQLDLEAEFYFTHLIVMFKSPRPAAMVLDRSQDFGKTWKPYKYFATNCSATFGLEDDVVKKGAICTSKYSSPFPCTGGEVIFKALSPPHDTENPYSAKVQEQLKITNLRVQLLKRQSCPCQRNDLNEEPQHFTHYAIYDFIVKGSCFCNGHADQCIPVHGFRPVKAPGTFHMVHGKCMCKHNTAGSHCQHCAPLYNDRPWEAADGKTGAPNECRACKCNGHADTCHFDVNVWEASGSRSGGVCDDCQHNTEGQYCQRCKPGFYRDLRRPFSAPDACKPCSCHPVGSAVLPANSVTFCDPSNGDCPCKPGVAGRRCDRCMVGYWGFGDYGCRPCDCAGSCDPITGDCISSHTDIDWCHEVPD

SEQ ID NO: 435 - DNA, 1431 bp, Homo sapiens
  CDS (1)..(1431)
atggggagctgcgcgcggctgctgctgctctggggctgcacggtggtggccgcaggactgagtggagtagctggagtgagttcccgctgtgaaaaagcctgcaaccctcggatgggaaatttggctttggggcgaaaactctgggcagacaccacctgcggtcagaatgctaccgaactgtactgcttctacagtgagaacaaggatctgacttgtcggcagcccaaatgtgacaagtgcaatgctgcctatcctcacctggctcacctgccatctgccatggcagactcatccttccggtttcctcgcacatggtggcagtctgcggaggatgtgcacagagaaaagatccagttagacctggaagctgaattctacttcactcacctaattgtgatgttcaagtcccccaggccggctgccatggtgctggaccgctcccaggactttgggaaaacatggaagccttataagtactttgcgactaactgctccgctacatttggcctggaagatgatgttgtcaagaagggcgctatttgtacttctaaatactccagtccttttccatgcactggaggagaggttattttcaaagctttgtcaccaccacacgatacagagaacccttacagtgccaaagttcaggagcagctgaagatcaccaaccttcgcgtgcagctgctgaaacgacagtcttgtccctgtcagagaaatgacctgaacgaagagcctcaacattttacacactatgcgatctatgatttcattgtcaagggcagctgcttctgcaatggccacgccgatcaatgcatacctgttcatggcttcagacctgtcaaggccccaggaacattccacatggtccatgggaagtgtatgtgtaagcacaacacagcaggcagccactgccagcactgtgccccgttatacaatgaccggccatgggaggcagctgatggcaaaacgggggctcccaacgagtgcagagcctgcaagtgtaatgggcatgctgatacctgtcacttcgacgttaatgtgtgggaggcatcagggaatcgtagtggtggtgtctgtgatgactgtcagcacaacacagaaggacagtattgccagaggtgcaagccaggcttctatcgtgacctgcggagacccttctcagctccagatgcttgcaaaccgtgttcctgccatccagtaggatcagctgtccttcctgccaactcagtgaccttctgcgaccccagcaatggtgactgcccttgcaagcctggggtggcagggcgacgttgtgacaggtgcatggtgggatactggggcttcggagactatggctgtcgaccatgtgactgtgcggggagctgtgaccctatcaccggagactgcatcagcagccacacagacatagactggtatcatgaagttcctgac

SEQ ID NO: 436 - protein, 477 aa, Homo sapiens
MGSCARLLLLWGCTVVAAGLSGVAGVSSRCEKACNPRMGNLALGRKLWADTTCGQNATELYCFYSENKDLTCRQPKCDKCNAAYPHLAHLPSAMADSSFRFPRTWWQSAEDVHREKIQLDLEAEFYFTHLIVMFKSPRPAAMVLDRSQDFGKTWKPYKYFATNCSATFGLEDDVVKKGAICTSKYSSPFPCTGGEVIFKALSPPHDTENPYSAKVQEQLKITNLRVQLLKRQSCPCQRNDLNEEPQHFTHYAIYDFIVKGSCFCNGHADQCIPVHGFRPVKAPGTFHMVHGKCMCKHNTAGSHCQHCAPLYNDRPWEAADGKTGAPNECRACKCNGHADTCHFDVNVWEASGNRSGGVCDDCQHNTEGQYCQRCKPGFYRDLRRPFSAPDACKPCSCHPVGSAVLPANSVTFCDPSNGDCPCKPGVAGRRCDRCMVGYWGFGDYGCRPCDCAGSCDPITGDCISSHTDIDWYHEVPD

SEQ ID NO: 437 - DNA, 1431 bp, Homo sapiens
  CDS (1)..(1431)
atggggagctgcgcgcggctgctgctgctctggggctgcacggtggtggccgcaggactgagtggagtagctggagtgagttcccgctgtgaaaaagcctgcaaccctcggatgggaaatttggctttggggcgaaaactctgggcagacaccacctgcggtcagaatgctaccgaactgtactgcttctacagtgagaacaaggatctgacttgtcggcagcccaaatgtgacaagtgcaatgctgcctatcctcacctggctcacctgccatctgccatggcagactcatccttccggtttcctcgcacatggtggcagtctgcggaggatgtgcacagagaaaagatccagttagacctggaagctgaattctacttcactcacctaattgtgatgttcaagtcccccaggccggctgccatggtgctggaccgctcccaggactttgggaaaacatggaagccttataagtactttgcgactaactgctccgctacatttggcctggaagatgatgttgtcaagaagggcgctatttgtacttctaaatactccagtccttttccatgcactggaggagaggttattttcaaagctttgtcaccaccacacgatacagagaacccttacagtgccaaagttcaggagcagctgaagatcaccaaccttcgcgtgcagctgctgaaacgacagtcttgtccctgtcagagaaatgacctgaacgaagagcctcaacattttacacactatgcgatctatgatttcattgtcaagggcagctgcttctgcaatggccacgccgatcaatgcatacctgttcatggcttcagacctgtcaaggccccaggaacattccacatggtccatgggaagtgtatgtgtaagcacaacacagcaggcagccactgccagcactgtgccccgttatacaatgaccggccatgggaggcagctgatggcaaaacgggggctcccaacgagtgcagaacccgcaagtgtaatgggcatgctgatacctgtcacttcgacgttaatgtgtgggaggcatcagggaatcgtagtggtggtgtctgtgatgactgtcagcacaacacagaaggacagtattgccagaggtgcaagccaggcttctatcgtgacctgcggagacccttctcagctccagatgcttgcaaaccgtgttcctgccatccagtaggatcagctgtccttcctgccaactcagtgaccttctgcgaccccagcaatggtgactgcccttgcaagcctggggtggcagggcgacgttgtgacaggtgcatggtgggatactggggcttcggagactatggctgtcgaccatgtgactgtgcggggagctgtgaccctatcaccggagactgcatcagcagccacacagacatagactggtgtcatgaagttcctgac

SEQ ID NO: 438 - protein, 477 aa, Homo sapiens
MGSCARLLLLWGCTVVAAGLSGVAGVSSRCEKACNPRMGNLALGRKLWADTTCGQNATELYCFYSENKDLTCRQPKCDKCNAAYPHLAHLPSAMADSSFRFPRTWWQSAEDVHREKIQLDLEAEFYFTHLIVMFKSPRPAAMVLDRSQDFGKTWKPYKYFATNCSATFGLEDDVVKKGAICTSKYSSPFPCTGGEVIFKALSPPHDTENPYSAKVQEQLKITNLRVQLLKRQSCPCQRNDLNEEPQHFTHYAIYDFIVKGSCFCNGHADQCIPVHGFRPVKAPGTFHMVHGKCMCKHNTAGSHCQHCAPLYNDRPWEAADGKTGAPNECRTRKCNGHADTCHFDVNVWEASGNRSGGVCDDCQHNTEGQYCQRCKPGFYRDLRRPFSAPDACKPCSCHPVGSAVLPANSVTFCDPSNGDCPCKPGVAGRRCDRCMVGYWGFGDYGCRPCDCAGSCDPITGDCISSHTDIDWCHEVPD

SEQ ID NO: 439 - DNA, 1431 bp, Homo sapiens
  CDS (1)..(1431)
atggggagctgcgcgcggctgctgctgctctggggctgcacggtggtggccgcaggactgagtggagtagctggagtgagttcccgctgtgaaaaagcctgcaaccctcggatgggaaatttggctttggggcgaaaactctgggcagacaccacctgcggtcagaatgctaccgaactgtactgcttctacagtgagaacaaggatctgacttgtcggcagcccaaatgtgacaagtgcaatgctgcctatcctcacctggctcacctgccatctgccatggcagactcatccttccggtttcctcgcacatggtggcagtctgcggaggatgtgcacagagaaaagatccagttagacctggaagctgaattctacttcactcacctaattgtgatgttcaagtcccccaggccggctgccatggtgctggaccgctcccaggactttgggaaaacatggaagccttataagtactttgcgactaactgctccgctacatttggcctggaagatgatgttgtcaagaagggcgctatttgtacttctaaatactccagtccttttccatgcactggaggagaggttattttcaaagctttgtcaccaccacacgatacagagaacccttacagtgccaaagttcaggagcagctgaagatcaccaaccttcgcgtgcagctgctgaaacgacagtcttgtccctgtcagagaaatgacctgaacgaagagcctcaacattttacacactatgcgatctatgatttcattgtcaagggcagctgcttctgcaatggccacgccgatcaatgcatacctgttcatggcttcagacctgtcaaggccccaggaacattccacatggtccatgggaagtgtatgtgtaagcacaacacagcaggcagccactgccagcactgtgccccgttatacaatgaccggccatgggaggcagctgatggcaaaacgggggctcccaacgagtgcagaacctgcaagtgtaatgggcatgctgatacctgtcacttcgacgttaatgtgtgggaggcatcagggagtcgtagtggtggtgtctgtgatgactgtcagcacaacacagaaggacagtattgccagaggtgcaagccaggcttctatcgtgacctgcggagacccttctcagctccagatgcttgcaaaccgtgttcctgccatccagtaggatcagctgtccttcctgccaactcagtgaccttctgcgaccccagcaatggtgactgcccttgcaagcctggggtggcagggcgacgttgtgacaggtgcatggtgggatactggggcttcggagactatggctgtcgaccatgtgactgtgcggggagctgtgaccctatcaccggagactgcatcagcagccacacagacatagactggtgtcatgaagttcctgac

SEQ ID NO: 440 - protein, 477 aa, Homo sapiens
MGSCARLLLLWGCTVVAAGLSGVAGVSSRCEKACNPRMGNLALGRKLWADTTCGQNATELYCFYSENKDLTCRQPKCDKCNAAYPHLAHLPSAMADSSFRFPRTWWQSAEDVHREKIQLDLEAEFYFTHLIVMFKSPRPAAMVLDRSQDFGKTWKPYKYFATNCSATFGLEDDVVKKGAICTSKYSSPFPCTGGEVIFKALSPPHDTENPYSAKVQEQLKITNLRVQLLKRQSCPCQRNDLNEEPQHFTHYAIYDFIVKGSCFCNGHADQCIPVHGFRPVKAPGTFHMVHGKCMCKHNTAGSHCQHCAPLYNDRPWEAADGKTGAPNECRTCKCNGHADTCHFDVNVWEASGSRSGGVCDDCQHNTEGQYCQRCKPGFYRDLRRPFSAPDACKPCSCHPVGSAVLPANSVTFCDPSNGDCPCKPGVAGRRCDRCMVGYWGFGDYGCRPCDCAGSCDPITGDCISSHTDIDWCHEVPD

SEQ ID NO: 441 - DNA, 1431 bp, Homo sapiens
  CDS (1)..(1431)
atggggagctgcgcgcggctgctgctgctctggggctgcacggtggtggccgcaggactgagtggagtagctggagtgagttcccgctgtgaaaaagcctgcaaccctcggatgggaaatttggctttggggcgaaaactctgggcagacaccacctgcggtcagaatgctaccgaactgtactgcttctacagtgagaacaaggatctgacttgtcggcagcccaaatgtgacaagtgcaatgctgcctatcctcacctggctcacctgccatctgccatggcagactcatccttccggtttcctcgcacatggtggcagtctgcggaggatgtgcacagagaaaagatccagttagacctggaagctgaattctacttcactcacctaattgtgatgttcaagtcccccaggccggctgccatggtgctggaccgctcccaggactttgggaaaacatggaagccttataagtactttgcgactaactgctccgctacatttggcctggaagatgatgttgtcaagaagggcgctatttgtacttctaaatactccagtccttttccatgcactggaggagaggttattttcaaagctttgtcaccaccacacgatacagagaacccttacagtgccaaagttcaggagcagctgaagatcaccaaccttcgcgtgcagctgctgaaacgacagtcttgtccctgtcagagaaatgacctgaacgaagagcctcaacattttacacactatgcgatctatgatttcattgtcaagggcagctgcttctgcaatggccacgccgatcaatgcatacctgttcatggcttcagacctgtcaaggccccaggaacattccacatggtccatgggaagtgtatgtgtaagcacaacacagcaggcagccactgccagcactgtgccccgttatacaatgaccggccatgggaggcagctgatggcaaaacgggggctcccaacgagtgcagaacctgcaagtgtaatgggcatgctgatacctgtcacttcgacgttaatgtgtgggaggcatcagggaatcgtagtggtggtgtctgtgatgactgtcagcacaacacagaaggacagtattgccagaggtgcaagccaggcttctatcgtgacctgcggagacccttctcagctccagatgcttgcaaaccgtgttcctgccatccagtaggatcagctgtccttcctgccaactcagtgaccttctgcgaccccagcaatggtgactgcccttgcaagcctggggtggcagggcgacgttgtgacaggtgcatggtgggatactggggcttcggagactatggctgtcgaccatgtgactgtgcggggagctgtgaccctatcaccggagactgcatcagcagccacacagacatagactggtatcatgaagttcctgac

SEQ ID NO: 442 - protein, 477 aa, Homo sapiens
MGSCARLLLLWGCTVVAAGLSGVAGVSSRCEKACNPRMGNLALGRKLWADTTCGQNATELYCFYSENKDLTCRQPKCDKCNAAYPHLAHLPSAMADSSFRFPRTWWQSAEDVHREKIQLDLEAEFYFTHLIVMFKSPRPAAMVLDRSQDFGKTWKPYKYFATNCSATFGLEDDVVKKGAICTSKYSSPFPCTGGEVIFKALSPPHDTENPYSAKVQEQLKITNLRVQLLKRQSCPCQRNDLNEEPQHFTHYAIYDFIVKGSCFCNGHADQCIPVHGFRPVKAPGTFHMVHGKCMCKHNTAGSHCQHCAPLYNDRPWEAADGKTGAPNECRTCKCNGHADTCHFDVNVWEASGNRSGGVCDDCQHNTEGQYCQRCKPGFYRDLRRPFSAPDACKPCSCHPVGSAVLPANSVTFCDPSNGDCPCKPGVAGRRCDRCMVGYWGFGDYGCRPCDCAGSCDPITGDCISSHTDIDWYHEVPD

SEQ ID NO: 443 - DNA, 1431 bp, Homo sapiens
  CDS (1)..(1431)
atggggagctgcgcgcggctgctgctgctctggggctgcacggtggtggccgcaggactgagtggagtagctggagtgagttcccgctgtgaaaaagcctgcaaccctcggatgggaaatttggctttggggcgaaaactctgggcagacaccacctgcggtcagaatgctaccgaactgtactgcttctacagtgagaacaaggatctgacttgtcggcagcccaaatgtgacaagtgcaatgctgcctatcctcacctggctcacctgccatctgccatggcagactcatccttccggtttcctcgcacatggtggcagtctgcggaggatgtgcacagagaaaagatccagttagacctggaagctgaattctacttcactcacctaattgtgatgttcaagtcccccaggccggctgccatggtgctggaccgctcccaggactttgggaaaacatggaagccttataagtactttgcgactaactgctccgctacatttggcctggaagatgatgttgtcaagaagggcgctatttgtacttctaaatactccagtccttttccatgcactggaggagaggttattttcaaagctttgtcaccaccacacgatacagagaacccttacagtgccaaagttcaggagcagctgaagatcaccaaccttcgcgtgcagctgctgaaacgacagtcttgtccctgtcagagaaatgacctgaacgaagagcctcaacattttacacactatgcgatctatgatttcattgtcaagggcagctgcttctgcaatggccacgccgatcaatgcatacctgttcatggcttcagacctgtcaaggccccaggaacattccacatggtccatgggaagtgtatgtgtaagcacaacacagcaggcagccactgccagcactgtgccccgttatacaatgaccggccatgggaggcagctgatggcaaaacgggggctcccaacgagtgcagaacccgcaagtgtaatgggcatgctgatacctgtcacttcgacgttaatgtgtgggaggcatcagggagtcgtagtggtggtgtctgtgatgactgtcagcacaacacagaaggacagtattgccagaggtgcaagccaggcttctatcgtgacctgcggagacccttctcagctccagatgcttgcaaaccgtgttcctgccatccagtaggatcagctgtccttcctgccaactcagtgaccttctgcgaccccagcaatggtgactgcccttgcaagcctggggtggcagggcgacgttgtgacaggtgcatggtgggatactggggcttcggagactatggctgtcgaccatgtgactgtgcggggagctgtgaccctatcaccggagactgcatcagcagccacacagacatagactggtgtcatgaagttcctgac

SEQ ID NO: 444 - protein, 477 aa, Homo sapiens
MGSCARLLLLWGCTVVAAGLSGVAGVSSRCEKACNPRMGNLALGRKLWADTTCGQNATELYCFYSENKDLTCRQPKCDKCNAAYPHLAHLPSAMADSSFRFPRTWWQSAEDVHREKIQLDLEAEFYFTHLIVMFKSPRPAAMVLDRSQDFGKTWKPYKYFATNCSATFGLEDDVVKKGAICTSKYSSPFPCTGGEVIFKALSPPHDTENPYSAKVQEQLKITNLRVQLLKRQSCPCQRNDLNEEPQHFTHYAIYDFIVKGSCFCNGHADQCIPVHGFRPVKAPGTFHMVHGKCMCKHNTAGSHCQHCAPLYNDRPWEAADGKTGAPNECRTRKCNGHADTCHFDVNVWEASGSRSGGVCDDCQHNTEGQYCQRCKPGFYRDLRRPFSAPDACKPCSCHPVGSAVLPANSVTFCDPSNGDCPCKPGVAGRRCDRCMVGYWGFGDYGCRPCDCAGSCDPITGDCISSHTDIDWCHEVPD

SEQ ID NO: 445 - DNA, 1431 bp, Homo sapiens
  CDS (1)..(1431)
atggggagctgcgcgcggctgctgctgctctggggctgcacggtggtggccgcaggactgagtggagtagctggagtgagttcccgctgtgaaaaagcctgcaaccctcggatgggaaatttggctttggggcgaaaactctgggcagacaccacctgcggtcagaatgctaccgaactgtactgcttctacagtgagaacaaggatctgacttgtcggcagcccaaatgtgacaagtgcaatgctgcctatcctcacctggctcacctgccatctgccatggcagactcatccttccggtttcctcgcacatggtggcagtctgcggaggatgtgcacagagaaaagatccagttagacctggaagctgaattctacttcactcacctaattgtgatgttcaagtcccccaggccggctgccatggtgctggaccgctcccaggactttgggaaaacatggaagccttataagtactttgcgactaactgctccgctacatttggcctggaagatgatgttgtcaagaagggcgctatttgtacttctaaatactccagtccttttccatgcactggaggagaggttattttcaaagctttgtcaccaccacacgatacagagaacccttacagtgccaaagttcaggagcagctgaagatcaccaaccttcgcgtgcagctgctgaaacgacagtcttgtccctgtcagagaaatgacctgaacgaagagcctcaacattttacacactatgcgatctatgatttcattgtcaagggcagctgcttctgcaatggccacgccgatcaatgcatacctgttcatggcttcagacctgtcaaggccccaggaacattccacatggtccatgggaagtgtatgtgtaagcacaacacagcaggcagccactgccagcactgtgccccgttatacaatgaccggccatgggaggcagctgatggcaaaacgggggctcccaacgagtgcagaacccgcaagtgtaatgggcatgctgatacctgtcacttcgacgttaatgtgtgggaggcatcagggaatcgtagtggtggtgtctgtgatgactgtcagcacaacacagaaggacagtattgccagaggtgcaagccaggcttctatcgtgacctgcggagacccttctcagctccagatgcttgcaaaccgtgttcctgccatccagtaggatcagctgtccttcctgccaactcagtgaccttctgcgaccccagcaatggtgactgcccttgcaagcctggggtggcagggcgacgttgtgacaggtgcatggtgggatactggggcttcggagactatggctgtcgaccatgtgactgtgcggggagctgtgaccctatcaccggagactgcatcagcagccacacagacatagactggtatcatgaagttcctgac

SEQ ID NO: 446 - protein, 477 aa, Homo sapiens
MGSCARLLLLWGCTVVAAGLSGVAGVSSRCEKACNPRMGNLALGRKLWADTTCGQNATELYCFYSENKDLTCRQPKCDKCNAAYPHLAHLPSAMADSSFRFPRTWWQSAEDVHREKIQLDLEAEFYFTHLIVMFKSPRPAAMVLDRSQDFGKTWKPYKYFATNCSATFGLEDDVVKKGAICTSKYSSPFPCTGGEVIFKALSPPHDTENPYSAKVQEQLKITNLRVQLLKRQSCPCQRNDLNEEPQHFTHYAIYDFIVKGSCFCNGHADQCIPVHGFRPVKAPGTFHMVHGKCMCKHNTAGSHCQHCAPLYNDRPWEAADGKTGAPNECRTRKCNGHADTCHFDVNVWEASGNRSGGVCDDCQHNTEGQYCQRCKPGFYRDLRRPFSAPDACKPCSCHPVGSAVLPANSVTFCDPSNGDCPCKPGVAGRRCDRCMVGYWGFGDYGCRPCDCAGSCDPITGDCISSHTDIDWYHEVPD

SEQ ID NO: 447 - DNA, 1431 bp, Homo sapiens
  CDS (1)..(1431)
atggggagctgcgcgcggctgctgctgctctggggctgcacggtggtggccgcaggactgagtggagtagctggagtgagttcccgctgtgaaaaagcctgcaaccctcggatgggaaatttggctttggggcgaaaactctgggcagacaccacctgcggtcagaatgctaccgaactgtactgcttctacagtgagaacaaggatctgacttgtcggcagcccaaatgtgacaagtgcaatgctgcctatcctcacctggctcacctgccatctgccatggcagactcatccttccggtttcctcgcacatggtggcagtctgcggaggatgtgcacagagaaaagatccagttagacctggaagctgaattctacttcactcacctaattgtgatgttcaagtcccccaggccggctgccatggtgctggaccgctcccaggactttgggaaaacatggaagccttataagtactttgcgactaactgctccgctacatttggcctggaagatgatgttgtcaagaagggcgctatttgtacttctaaatactccagtccttttccatgcactggaggagaggttattttcaaagctttgtcaccaccacacgatacagagaacccttacagtgccaaagttcaggagcagctgaagatcaccaaccttcgcgtgcagctgctgaaacgacagtcttgtccctgtcagagaaatgacctgaacgaagagcctcaacattttacacactatgcgatctatgatttcattgtcaagggcagctgcttctgcaatggccacgccgatcaatgcatacctgttcatggcttcagacctgtcaaggccccaggaacattccacatggtccatgggaagtgtatgtgtaagcacaacacagcaggcagccactgccagcactgtgccccgttatacaatgaccggccatgggaggcagctgatggcaaaacgggggctcccaacgagtgcagaacctgcaagtgtaatgggcatgctgatacctgtcacttcgacgttaatgtgtgggaggcatcagggagtcgtagtggtggtgtctgtgatgactgtcagcacaacacagaaggacagtattgccagaggtgcaagccaggcttctatcgtgacctgcggagacccttctcagctccagatgcttgcaaaccgtgttcctgccatccagtaggatcagctgtccttcctgccaactcagtgaccttctgcgaccccagcaatggtgactgcccttgcaagcctggggtggcagggcgacgttgtgacaggtgcatggtgggatactggggcttcggagactatggctgtcgaccatgtgactgtgcggggagctgtgaccctatcaccggagactgcatcagcagccacacagacatagactggtatcatgaagttcctgac

SEQ ID NO: 448 - protein, 477 aa, Homo sapiens
MGSCARLLLLWGCTVVAAGLSGVAGVSSRCEKACNPRMGNLALGRKLWADTTCGQNATELYCFYSENKDLTCRQPKCDKCNAAYPHLAHLPSAMADSSFRFPRTWWQSAEDVHREKIQLDLEAEFYFTHLIVMFKSPRPAAMVLDRSQDFGKTWKPYKYFATNCSATFGLEDDVVKKGAICTSKYSSPFPCTGGEVIFKALSPPHDTENPYSAKVQEQLKITNLRVQLLKRQSCPCQRNDLNEEPQHFTHYAIYDFIVKGSCFCNGHADQCIPVHGFRPVKAPGTFHMVHGKCMCKHNTAGSHCQHCAPLYNDRPWEAADGKTGAPNECRTCKCNGHADTCHFDVNVWEASGSRSGGVCDDCQHNTEGQYCQRCKPGFYRDLRRPFSAPDACKPCSCHPVGSAVLPANSVTFCDPSNGDCPCKPGVAGRRCDRCMVGYWGFGDYGCRPCDCAGSCDPITGDCISSHTDIDWYHEVPD

SEQ ID NO: 449 - DNA, 1431 bp, Homo sapiens
  CDS (1)..(1431)
atggggagctgcgcgcggctgctgctgctctggggctgcacggtggtggccgcaggactgagtggagtagctggagtgagttcccgctgtgaaaaagcctgcaaccctcggatgggaaatttggctttggggcgaaaactctgggcagacaccacctgcggtcagaatgctaccgaactgtactgcttctacagtgagaacaaggatctgacttgtcggcagcccaaatgtgacaagtgcaatgctgcctatcctcacctggctcacctgccatctgccatggcagactcatccttccggtttcctcgcacatggtggcagtctgcggaggatgtgcacagagaaaagatccagttagacctggaagctgaattctacttcactcacctaattgtgatgttcaagtcccccaggccggctgccatggtgctggaccgctcccaggactttgggaaaacatggaagccttataagtactttgcgactaactgctccgctacatttggcctggaagatgatgttgtcaagaagggcgctatttgtacttctaaatactccagtccttttccatgcactggaggagaggttattttcaaagctttgtcaccaccacacgatacagagaacccttacagtgccaaagttcaggagcagctgaagatcaccaaccttcgcgtgcagctgctgaaacgacagtcttgtccctgtcagagaaatgacctgaacgaagagcctcaacattttacacactatgcgatctatgatttcattgtcaagggcagctgcttctgcaatggccacgccgatcaatgcatacctgttcatggcttcagacctgtcaaggccccaggaacattccacatggtccatgggaagtgtatgtgtaagcacaacacagcaggcagccactgccagcactgtgccccgttatacaatgaccggccatgggaggcagctgatggcaaaacgggggctcccaacgagtgcagaacccgcaagtgtaatgggcatgctgatacctgtcacttcgacgttaatgtgtgggaggcatcagggagtcgtagtggtggtgtctgtgatgactgtcagcacaacacagaaggacagtattgccagaggtgcaagccaggcttctatcgtgacctgcggagacccttctcagctccagatgcttgcaaaccgtgttcctgccatccagtaggatcagctgtccttcctgccaactcagtgaccttctgcgaccccagcaatggtgactgcccttgcaagcctggggtggcagggcgacgttgtgacaggtgcatggtgggatactggggcttcggagactatggctgtcgaccatgtgactgtgcggggagctgtgaccctatcaccggagactgcatcagcagccacacagacatagactggtatcatgaagttcctgac

SEQ ID NO: 450 - protein, 477 aa, Homo sapiens
MGSCARLLLLWGCTVVAAGLSGVAGVSSRCEKACNPRMGNLALGRKLWADTTCGQNATELYCFYSENKDLTCRQPKCDKCNAAYPHLAHLPSAMADSSFRFPRTWWQSAEDVHREKIQLDLEAEFYFTHLIVMFKSPRPAAMVLDRSQDFGKTWKPYKYFATNCSATFGLEDDVVKKGAICTSKYSSPFPCTGGEVIFKALSPPHDTENPYSAKVQEQLKITNLRVQLLKRQSCPCQRNDLNEEPQHFTHYAIYDFIVKGSCFCNGHADQCIPVHGFRPVKAPGTFHMVHGKCMCKHNTAGSHCQHCAPLYNDRPWEAADGKTGAPNECRTRKCNGHADTCHFDVNVWEASGSRSGGVCDDCQHNTEGQYCQRCKPGFYRDLRRPFSAPDACKPCSCHPVGSAVLPANSVTFCDPSNGDCPCKPGVAGRRCDRCMVGYWGFGDYGCRPCDCAGSCDPITGDCISSHTDIDWYHEVPD

SEQ ID NO: 451 - DNA, 1404 bp, Homo sapiens
  CDS (1)..(1404)
ctgagtggagtagctggagtgagttcccgctgtgaaaaagcctgcaaccctcggatgggaaatttggctttggggcgaaaactctgggcagacaccacctgcggtcagaatgctaccgaactgtactgcttctacagtgagaacacggatctgacttgtcggcagcccaaatgtgacaagtgcaatgctgcctatcctcacctggctcacctgccatctgccatggcagactcatccttccggtttcctcgcacatggtggcagtctgcggaggatgtgcacagagaaaagatccagttagacctggaagctgaattctacttcactcacctaattgtgatgttcaagtcccccaggccggctgccatggtgctggaccgctcccaggactttgggaaaacatggaagccttataagtactttgcgactaactgctccgctacatttggcctggaagatgatgttgtcaagaagggcgctatttgtactcctaaatactccagtccttttccatgcactggaggagaggttattttcaaagctttgtcaccaccatacgatacagagaacccttacagtgccaaagttcaggagcagctgaagatcaccaaccttcgcgtgcagctgctgaaacgacagtcttatccctgtcagagaaatgacctgaacgaagagcctcaacattttacacactatgcgatctatgatttcattgtcaagggcagctgcttctgcaatggccacgccgatcaatgcatacctgttcatggcttcagacctgtcaaggccccaggaacattccacatggtccatgggaagtgtatgtgtaagcacaacacagcaggcagccactgccagcactgtgccccgttatacaatgaccggccatgggaggcagctgatggcaaaacgggggctcccaacgagtgcagaacccgcaagtgtaatgggcatgctgatacctgtcacttcgacgttaatgtgtgggaggcatcagggagtcgtagtggtggtgtctgtgatgactgtcagcacaacacagaaggacagtattgccagaggtgcaagccaggcttctatcgtgacctgcggagacccttctcagctccagatgcttgcaaaccgtgttcctgccatccagtaggatcagctgtccttcctgccaactcagtgaccttctgcgaccccagcaatggtgactgcccttgcaagcctggggtggcagggcgacgttgtgacaggtgcatggtgggatactggggcttcggagactatggctgtcgaccatgtgactgtgcggggagctgtgaccctatcaccggagactgcatcagcagccacacagacatagactggtatcatgaagttcctgacggatccgagctcggtaccaagcttacgtag

SEQ ID NO: 452 - protein, 467 aa, Homo sapiens
LSGVAGVSSRCEKACNPRMGNLALGRKLWADTTCGQNATELYCFYSENTDLTCRQPKCDKCNAAYPHLAHLPSAMADSSFRFPRTWWQSAEDVHREKIQLDLEAEFYFTHLIVMFKSPRPAAMVLDRSQDFGKTWKPYKYFATNCSATFGLEDDVVKKGAICTPKYSSPFPCTGGEVIFKALSPPYDTENPYSAKVQEQLKITNLRVQLLKRQSYPCQRNDLNEEPQHFTHYAIYDFIVKGSCFCNGHADQCIPVHGFRPVKAPGTFHMVHGKCMCKHNTAGSHCQHCAPLYNDRPWEAADGKTGAPNECRTRKCNGHADTCHFDVNVWEASGSRSGGVCDDCQHNTEGQYCQRCKPGFYRDLRRPFSAPDACKPCSCHPVGSAVLPANSVTFCDPSNGDCPCKPGVAGRRCDRCMVGYWGFGDYGCRPCDCAGSCDPITGDCISSHTDIDWYHEVPDGSELGTKLT

SEQ ID NO: 453 - DNA, 1374 bp, Homo sapiens
  CDS (1)..(1374)
ctgagtggagtagctggagtgagttcccgctgtgaaaaagcctgcaaccctcggatgggaaatttggctttggggcgaaaactctgggcagacaccacctgcggtcagaatgctaccgaactgtactgcttctacagtgagaacacggatctgacttgtcggcagcccaaatgtgacaagtgcaatgctgcctatcctcacctggctcacctgccatctgccatggcagactcatccttccggtttcctcgcacatggtggcagtctgcggaggatgtgcacagagaaaagatccagttagacctggaagctgaattctacttcactcacctaattgtgatgttcaagtcccccaggccggctgccatggtgctggaccgctcccaggactttgggaaaacatggaagccttataagtactttgcgactaactgctccgctacatttggcctggaagatgatgttgtcaagaagggcgctatttgtactcctaaatactccagtccttttccatgcactggaggagaggttattttcaaagctttgtcaccaccatacgatacagagaacccttacagtgccaaagttcaggagcagctgaagatcaccaaccttcgcgtgcagctgctgaaacgacagtcttatccctgtcagagaaatgacctgaacgaagagcctcaacattttacacactatgcgatctatgatttcattgtcaagggcagctgcttctgcaatggccacgccgatcaatgcatacctgttcatggcttcagacctgtcaaggccccaggaacattccacatggtccatgggaagtgtatgtgtaagcacaacacagcaggcagccactgccagcactgtgccccgttatacaatgaccggccatgggaggcagctgatggcaaaacgggggctcccaacgagtgcagagcccgcaagtgtaatgggcatgctgatacctgtcacttcgacgttaatgtgtgggaggcatcagggagtcgtagtggtggtgtctgtgatgactgtcagcacaacacagaaggacagtattgccagaggtgcaagccaggcttctatcgtgacctgcggagacccttctcagctccagatgcttgcaaaccgtgttcctgccatccagtaggatcagctgtccttcctgccaactcagtgaccttctgcgaccccagcaatggtgactgcccttgcaagcctggggtggcagggcgacgttgtgacaggtgcatggtgggatactggggcttcggagactatggctgtcgaccatgtgactgtgcggggagctgtgaccctatcaccggagactgcatcagcagccacacagacatagactggtatcatgaagttcctgac

SEQ ID NO: 454 - protein, 458 aa, Homo sapiens
LSGVAGVSSRCEKACNPRMGNLALGRKLWADTTCGQNATELYCFYSENTDLTCRQPKCDKCNAAYPHLAHLPSAMADSSFRFPRTWWQSAEDVHREKIQLDLEAEFYFTHLIVMFKSPRPAAMVLDRSQDFGKTWKPYKYFATNCSATFGLEDDVVKKGAICTPKYSSPFPCTGGEVIFKALSPPYDTENPYSAKVQEQLKITNLRVQLLKRQSYPCQRNDLNEEPQHFTHYAIYDFIVKGSCFCNGHADQCIPVHGFRPVKAPGTFHMVHGKCMCKHNTAGSHCQHCAPLYNDRPWEAADGKTGAPNECRARKCNGHADTCHFDVNVWEASGSRSGGVCDDCQHNTEGQYCQRCKPGFYRDLRRPFSAPDACKPCSCHPVGSAVLPANSVTFCDPSNGDCPCKPGVAGRRCDRCMVGYWGFGDYGCRPCDCAGSCDPITGDCISSHTDIDWYHEVPD

SEQ ID NO: 455 - DNA, 1374 bp, Homo sapiens
  CDS (1)..(1374)
ctgagtggagtagctggagtgagttcccgctgtgaaaaagcctgcaaccctcggatgggaaatttggctttggggcgaaaactctgggcagacaccacctgcggtcagaatgctaccgaactgtactgcttctacagtgagaacacggatctgacttgtcggcagcccaaatgtgacaagtgcaatgctgcctatcctcacctggctcacctgccatctgccatggcagactcatccttccggtttcctcgcacatggtggcagtctgcggaggatgtgcacagagaaaagatccagttagacctggaagctgaattctacttcactcacctaattgtgatgttcaagtcccccaggccggctgccatggtgctggaccgctcccaggactttgggaaaacatggaagccttataagtactttgcgactaactgctccgctacatttggcctggaagatgatgttgtcaagaagggcgctatttgtactcctaaatactccagtccttttccatgcactggaggagaggttattttcaaagctttgtcaccaccatacgatacagagaacccttacagtgccaaagttcaggagcagctgaagatcaccaaccttcgcgtgcagctgctgaaacgacagtcttatccctgtcagagaaatgacctgaacgaagagcctcaacattttacacactatgcgatctatgatttcattgtcaagggcagctgcttctgcaatggccacgccgatcaatgcatacctgttcatggcttcagacctgtcaaggccccaggaacattccacatggtccatgggaagtgtatgtgtaagcacaacacagcaggcagccactgccagcactgtgccccgttatacaatgaccggccatgggaggcagctgatggcaaaacgggggctcccaacgagtgcagaacctgcaagtgtaatgggcatgctgatacctgtcacttcgacgttaatgtgtgggaggcatcagggagtcgtagtggtggtgtctgtgatgactgtcagcacaacacagaaggacagtattgccagaggtgcaagccaggcttctatcgtgacctgcggagacccttctcagctccagatgcttgcaaaccgtgttcctgccatccagtaggatcagctgtccttcctgccaactcagtgaccttctgcgaccccagcaatggtgactgcccttgcaagcctggggtggcagggcgacgttgtgacaggtgcatggtgggatactggggcttcggagactatggctgtcgaccatgtgactgtgcggggagctgtgaccctatcaccggagactgcatcagcagccacacagacatagactggtatcatgaagttcctgac

SEQ ID NO: 456 - protein, 458 aa, Homo sapiens
LSGVAGVSSRCEKACNPRMGNLALGRKLWADTTCGQNATELYCFYSENTDLTCRQPKCDKCNAAYPHLAHLPSAMADSSFRFPRTWWQSAEDVHREKIQLDLEAEFYFTHLIVMFKSPRPAAMVLDRSQDFGKTWKPYKYFATNCSATFGLEDDVVKKGAICTPKYSSPFPCTGGEVIFKALSPPYDTENPYSAKVQEQLKITNLRVQLLKRQSYPCQRNDLNEEPQHFTHYAIYDFIVKGSCFCNGHADQCIPVHGFRPVKAPGTFHMVHGKCMCKHNTAGSHCQHCAPLYNDRPWEAADGKTGAPNECRTCKCNGHADTCHFDVNVWEASGSRSGGVCDDCQHNTEGQYCQRCKPGFYRDLRRPFSAPDACKPCSCHPVGSAVLPANSVTFCDPSNGDCPCKPGVAGRRCDRCMVGYWGFGDYGCRPCDCAGSCDPITGDCISSHTDIDWYHEVPD

SEQ ID NO: 457 - DNA, 1374 bp, Homo sapiens
  CDS (1)..(1374)
ctgagtggagtagctggagtgagttcccgctgtgaaaaagcctgcaaccctcggatgggaaatttggctttggggcgaaaactctgggcagacaccacctgcggtcagaatgctaccgaactgtactgcttctacagtgagaacacggatctgacttgtcggcagcccaaatgtgacaagtgcaatgctgcctatcctcacctggctcacctgccatctgccatggcagactcatccttccggtttcctcgcacatggtggcagtctgcggaggatgtgcacagagaaaagatccagttagacctggaagctgaattctacttcactcacctaattgtgatgttcaagtcccccaggccggctgccatggtgctggaccgctcccaggactttgggaaaacatggaagccttataagtactttgcgactaactgctccgctacatttggcctggaagatgatgttgtcaagaagggcgctatttgtactcctaaatactccagtccttttccatgcactggaggagaggttattttcaaagctttgtcaccaccatacgatacagagaacccttacagtgccaaagttcaggagcagctgaagatcaccaaccttcgcgtgcagctgctgaaacgacagtcttatccctgtcagagaaatgacctgaacgaagagcctcaacattttacacactatgcgatctatgatttcattgtcaagggcagctgcttctgcaatggccacgccgatcaatgcatacctgttcatggcttcagacctgtcaaggccccaggaacattccacatggtccatgggaagtgtatgtgtaagcacaacacagcaggcagccactgccagcactgtgccccgttatacaatgaccggccatgggaggcagctgatggcaaaacgggggctcccaacgagtgcagaacccgcaagtgtaatgggcatgctgatacctgtcacttcgacgttaatgtgtgggaggcatcagggaatcgtagtggtggtgtctgtgatgactgtcagcacaacacagaaggacagtattgccagaggtgcaagccaggcttctatcgtgacctgcggagacccttctcagctccagatgcttgcaaaccgtgttcctgccatccagtaggatcagctgtccttcctgccaactcagtgaccttctgcgaccccagcaatggtgactgcccttgcaagcctggggtggcagggcgacgttgtgacaggtgcatggtgggatactggggcttcggagactatggctgtcgaccatgtgactgtgcggggagctgtgaccctatcaccggagactgcatcagcagccacacagacatagactggtatcatgaagttcctgac

SEQ ID NO: 458 - protein, 458 aa, Homo sapiens
LSGVAGVSSRCEKACNPRMGNLALGRKLWADTTCGQNATELYCFYSENTDLTCRQPKCDKCNAAYPHLAHLPSAMADSSFRFPRTWWQSAEDVHREKIQLDLEAEFYFTHLIVMFKSPRPAAMVLDRSQDFGKTWKPYKYFATNCSATFGLEDDVVKKGAICTPKYSSPFPCTGGEVIFKALSPPYDTENPYSAKVQEQLKITNLRVQLLKRQSYPCQRNDLNEEPQHFTHYAIYDFIVKGSCFCNGHADQCIPVHGFRPVKAPGTFHMVHGKCMCKHNTAGSHCQHCAPLYNDRPWEAADGKTGAPNECRTRKCNGHADTCHFDVNVWEASGNRSGGVCDDCQHNTEGQYCQRCKPGFYRDLRRPFSAPDACKPCSCHPVGSAVLPANSVTFCDPSNGDCPCKPGVAGRRCDRCMVGYWGFGDYGCRPCDCAGSCDPITGDCISSHTDIDWYHEVPD

SEQ ID NO: 459 - DNA, 1374 bp, Homo sapiens
  CDS (1)..(1374)
ctgagtggagtagctggagtgagttcccgctgtgaaaaagcctgcaaccctcggatgggaaatttggctttggggcgaaaactctgggcagacaccacctgcggtcagaatgctaccgaactgtactgcttctacagtgagaacacggatctgacttgtcggcagcccaaatgtgacaagtgcaatgctgcctatcctcacctggctcacctgccatctgccatggcagactcatccttccggtttcctcgcacatggtggcagtctgcggaggatgtgcacagagaaaagatccagttagacctggaagctgaattctacttcactcacctaattgtgatgttcaagtcccccaggccggctgccatggtgctggaccgctcccaggactttgggaaaacatggaagccttataagtactttgcgactaactgctccgctacatttggcctggaagatgatgttgtcaagaagggcgctatttgtactcctaaatactccagtccttttccatgcactggaggagaggttattttcaaagctttgtcaccaccatacgatacagagaacccttacagtgccaaagttcaggagcagctgaagatcaccaaccttcgcgtgcagctgctgaaacgacagtcttatccctgtcagagaaatgacctgaacgaagagcctcaacattttacacactatgcgatctatgatttcattgtcaagggcagctgcttctgcaatggccacgccgatcaatgcatacctgttcatggcttcagacctgtcaaggccccaggaacattccacatggtccatgggaagtgtatgtgtaagcacaacacagcaggcagccactgccagcactgtgccccgttatacaatgaccggccatgggaggcagctgatggcaaaacgggggctcccaacgagtgcagaacccgcaagtgtaatgggcatgctgatacctgtcacttcgacgttaatgtgtgggaggcatcagggagtcgtagtggtggtgtctgtgatgactgtcagcacaacacagaaggacagtattgccagaggtgcaagccaggcttctatcgtgacctgcggagacccttctcagctccagatgcttgcaaaccgtgttcctgccatccagtaggatcagctgtccttcctgccaactcagtgaccttctgcgaccccagcaatggtgactgcccttgcaagcctggggtggcagggcgacgttgtgacaggtgcatggtgggatactggggcttcggagactatggctgtcgaccatgtgactgtgcggggagctgtgaccctatcaccggagactgcatcagcagccacacagacatagactggtgtcatgaagttcctgac

SEQ ID NO: 460 - protein, 458 aa, Homo sapiens
LSGVAGVSSRCEKACNPRMGNLALGRKLWADTTCGQNATELYCFYSENTDLTCRQPKCDKCNAAYPHLAHLPSAMADSSFRFPRTWWQSAEDVHREKIQLDLEAEFYFTHLIVMFKSPRPAAMVLDRSQDFGKTWKPYKYFATNCSATFGLEDDVVKKGAICTPKYSSPFPCTGGEVIFKALSPPYDTENPYSAKVQEQLKITNLRVQLLKRQSYPCQRNDLNEEPQHFTHYAIYDFIVKGSCFCNGHADQCIPVHGFRPVKAPGTFHMVHGKCMCKHNTAGSHCQHCAPLYNDRPWEAADGKTGAPNECRTRKCNGHADTCHFDVNVWEASGSRSGGVCDDCQHNTEGQYCQRCKPGFYRDLRRPFSAPDACKPCSCHPVGSAVLPANSVTFCDPSNGDCPCKPGVAGRRCDRCMVGYWGFGDYGCRPCDCAGSCDPITGDCISSHTDIDWCHEVPD

SEQ ID NO: 461 - DNA, 1374 bp, Homo sapiens
  CDS (1)..(1374)
ctgagtggagtagctggagtgagttcccgctgtgaaaaagcctgcaaccctcggatgggaaatttggctttggggcgaaaactctgggcagacaccacctgcggtcagaatgctaccgaactgtactgcttctacagtgagaacacggatctgacttgtcggcagcccaaatgtgacaagtgcaatgctgcctatcctcacctggctcacctgccatctgccatggcagactcatccttccggtttcctcgcacatggtggcagtctgcggaggatgtgcacagagaaaagatccagttagacctggaagctgaattctacttcactcacctaattgtgatgttcaagtcccccaggccggctgccatggtgctggaccgctcccaggactttgggaaaacatggaagccttataagtactttgcgactaactgctccgctacatttggcctggaagatgatgttgtcaagaagggcgctatttgtactcctaaatactccagtccttttccatgcactggaggagaggttattttcaaagctttgtcaccaccatacgatacagagaacccttacagtgccaaagttcaggagcagctgaagatcaccaaccttcgcgtgcagctgctgaaacgacagtcttatccctgtcagagaaatgacctgaacgaagagcctcaacattttacacactatgcgatctatgatttcattgtcaagggcagctgcttctgcaatggccacgccgatcaatgcatacctgttcatggcttcagacctgtcaaggccccaggaacattccacatggtccatgggaagtgtatgtgtaagcacaacacagcaggcagccactgccagcactgtgccccgttatacaatgaccggccatgggaggcagctgatggcaaaacgggggctcccaacgagtgcagagcctgcaagtgtaatgggcatgctgatacctgtcacttcgacgttaatgtgtgggaggcatcagggagtcgtagtggtggtgtctgtgatgactgtcagcacaacacagaaggacagtattgccagaggtgcaagccaggcttctatcgtgacctgcggagacccttctcagctccagatgcttgcaaaccgtgttcctgccatccagtaggatcagctgtccttcctgccaactcagtgaccttctgcgaccccagcaatggtgactgcccttgcaagcctggggtggcagggcgacgttgtgacaggtgcatggtgggatactggggcttcggagactatggctgtcgaccatgtgactgtgcggggagctgtgaccctatcaccggagactgcatcagcagccacacagacatagactggtatcatgaagttcctgac

SEQ ID NO: 462 - protein, 458 aa, Homo sapiens
LSGVAGVSSRCEKACNPRMGNLALGRKLWADTTCGQNATELYCFYSENTDLTCRQPKCDKCNAAYPHLAHLPSAMADSSFRFPRTWWQSAEDVHREKIQLDLEAEFYFTHLIVMFKSPRPAAMVLDRSQDFGKTWKPYKYFATNCSATFGLEDDVVKKGAICTPKYSSPFPCTGGEVIFKALSPPYDTENPYSAKVQEQLKITNLRVQLLKRQSYPCQRNDLNEEPQHFTHYAIYDFIVKGSCFCNGHADQCIPVHGFRPVKAPGTFHMVHGKCMCKHNTAGSHCQHCAPLYNDRPWEAADGKTGAPNECRACKCNGHADTCHFDVNVWEASGSRSGGVCDDCQHNTEGQYCQRCKPGFYRDLRRPFSAPDACKPCSCHPVGSAVLPANSVTFCDPSNGDCPCKPGVAGRRCDRCMVGYWGFGDYGCRPCDCAGSCDPITGDCISSHTDIDWYHEVPD

SEQ ID NO: 463 - DNA, 1374 bp, Homo sapiens
  CDS (1)..(1374)
ctgagtggagtagctggagtgagttcccgctgtgaaaaagcctgcaaccctcggatgggaaatttggctttggggcgaaaactctgggcagacaccacctgcggtcagaatgctaccgaactgtactgcttctacagtgagaacacggatctgacttgtcggcagcccaaatgtgacaagtgcaatgctgcctatcctcacctggctcacctgccatctgccatggcagactcatccttccggtttcctcgcacatggtggcagtctgcggaggatgtgcacagagaaaagatccagttagacctggaagctgaattctacttcactcacctaattgtgatgttcaagtcccccaggccggctgccatggtgctggaccgctcccaggactttgggaaaacatggaagccttataagtactttgcgactaactgctccgctacatttggcctggaagatgatgttgtcaagaagggcgctatttgtactcctaaatactccagtccttttccatgcactggaggagaggttattttcaaagctttgtcaccaccatacgatacagagaacccttacagtgccaaagttcaggagcagctgaagatcaccaaccttcgcgtgcagctgctgaaacgacagtcttatccctgtcagagaaatgacctgaacgaagagcctcaacattttacacactatgcgatctatgatttcattgtcaagggcagctgcttctgcaatggccacgccgatcaatgcatacctgttcatggcttcagacctgtcaaggccccaggaacattccacatggtccatgggaagtgtatgtgtaagcacaacacagcaggcagccactgccagcactgtgccccgttatacaatgaccggccatgggaggcagctgatggcaaaacgggggctcccaacgagtgcagagcccgcaagtgtaatgggcatgctgatacctgtcacttcgacgttaatgtgtgggaggcatcagggaatcgtagtggtggtgtctgtgatgactgtcagcacaacacagaaggacagtattgccagaggtgcaagccaggcttctatcgtgacctgcggagacccttctcagctccagatgcttgcaaaccgtgttcctgccatccagtaggatcagctgtccttcctgccaactcagtgaccttctgcgaccccagcaatggtgactgcccttgcaagcctggggtggcagggcgacgttgtgacaggtgcatggtgggatactggggcttcggagactatggctgtcgaccatgtgactgtgcggggagctgtgaccctatcaccggagactgcatcagcagccacacagacatagactggtatcatgaagttcctgac

SEQ ID NO: 464 - protein, 458 aa, Homo sapiens
LSGVAGVSSRCEKACNPRMGNLALGRKLWADTTCGQNATELYCFYSENTDLTCRQPKCDKCNAAYPHLAHLPSAMADSSFRFPRTWWQSAEDVHREKIQLDLEAEFYFTHLIVMFKSPRPAAMVLDRSQDFGKTWKPYKYFATNCSATFGLEDDVVKKGAICTPKYSSPFPCTGGEVIFKALSPPYDTENPYSAKVQEQLKITNLRVQLLKRQSYPCQRNDLNEEPQHFTHYAIYDFIVKGSCFCNGHADQCIPVHGFRPVKAPGTFHMVHGKCMCKHNTAGSHCQHCAPLYNDRPWEAADGKTGAPNECRARKCNGHADTCHFDVNVWEASGNRSGGVCDDCQHNTEGQYCQRCKPGFYRDLRRPFSAPDACKPCSCHPVGSAVLPANSVTFCDPSNGDCPCKPGVAGRRCDRCMVGYWGFGDYGCRPCDCAGSCDPITGDCISSHTDIDWYHEVPD

SEQ ID NO: 465 - DNA, 1374 bp, Homo sapiens
  CDS (1)..(1374)
ctgagtggagtagctggagtgagttcccgctgtgaaaaagcctgcaaccctcggatgggaaatttggctttggggcgaaaactctgggcagacaccacctgcggtcagaatgctaccgaactgtactgcttctacagtgagaacacggatctgacttgtcggcagcccaaatgtgacaagtgcaatgctgcctatcctcacctggctcacctgccatctgccatggcagactcatccttccggtttcctcgcacatggtggcagtctgcggaggatgtgcacagagaaaagatccagttagacctggaagctgaattctacttcactcacctaattgtgatgttcaagtcccccaggccggctgccatggtgctggaccgctcccaggactttgggaaaacatggaagccttataagtactttgcgactaactgctccgctacatttggcctggaagatgatgttgtcaagaagggcgctatttgtactcctaaatactccagtccttttccatgcactggaggagaggttattttcaaagctttgtcaccaccatacgatacagagaacccttacagtgccaaagttcaggagcagctgaagatcaccaaccttcgcgtgcagctgctgaaacgacagtcttatccctgtcagagaaatgacctgaacgaagagcctcaacattttacacactatgcgatctatgatttcattgtcaagggcagctgcttctgcaatggccacgccgatcaatgcatacctgttcatggcttcagacctgtcaaggccccaggaacattccacatggtccatgggaagtgtatgtgtaagcacaacacagcaggcagccactgccagcactgtgccccgttatacaatgaccggccatgggaggcagctgatggcaaaacgggggctcccaacgagtgcagagcccgcaagtgtaatgggcatgctgatacctgtcacttcgacgttaatgtgtgggaggcatcagggagtcgtagtggtggtgtctgtgatgactgtcagcacaacacagaaggacagtattgccagaggtgcaagccaggcttctatcgtgacctgcggagacccttctcagctccagatgcttgcaaaccgtgttcctgccatccagtaggatcagctgtccttcctgccaactcagtgaccttctgcgaccccagcaatggtgactgcccttgcaagcctggggtggcagggcgacgttgtgacaggtgcatggtgggatactggggcttcggagactatggctgtcgaccatgtgactgtgcggggagctgtgaccctatcaccggagactgcatcagcagccacacagacatagactggtgtcatgaagttcctgac

SEQ ID NO: 466 - protein, 458 aa, Homo sapiens
LSGVAGVSSRCEKACNPRMGNLALGRKLWADTTCGQNATELYCFYSENTDLTCRQPKCDKCNAAYPHLAHLPSAMADSSFRFPRTWWQSAEDVHREKIQLDLEAEFYFTHLIVMFKSPRPAAMVLDRSQDFGKTWKPYKYFATNCSATFGLEDDVVKKGAICTPKYSSPFPCTGGEVIFKALSPPYDTENPYSAKVQEQLKITNLRVQLLKRQSYPCQRNDLNEEPQHFTHYAIYDFIVKGSCFCNGHADQCIPVHGFRPVKAPGTFHMVHGKCMCKHNTAGSHCQHCAPLYNDRPWEAADGKTGAPNECRARKCNGHADTCHFDVNVWEASGSRSGGVCDDCQHNTEGQYCQRCKPGFYRDLRRPFSAPDACKPCSCHPVGSAVLPANSVTFCDPSNGDCPCKPGVAGRRCDRCMVGYWGFGDYGCRPCDCAGSCDPITGDCISSHTDIDWCHEVPD

SEQ ID NO: 467 - DNA, 1374 bp, Homo sapiens
  CDS (1)..(1374)
ctgagtggagtagctggagtgagttcccgctgtgaaaaagcctgcaaccctcggatgggaaatttggctttggggcgaaaactctgggcagacaccacctgcggtcagaatgctaccgaactgtactgcttctacagtgagaacacggatctgacttgtcggcagcccaaatgtgacaagtgcaatgctgcctatcctcacctggctcacctgccatctgccatggcagactcatccttccggtttcctcgcacatggtggcagtctgcggaggatgtgcacagagaaaagatccagttagacctggaagctgaattctacttcactcacctaattgtgatgttcaagtcccccaggccggctgccatggtgctggaccgctcccaggactttgggaaaacatggaagccttataagtactttgcgactaactgctccgctacatttggcctggaagatgatgttgtcaagaagggcgctatttgtactcctaaatactccagtccttttccatgcactggaggagaggttattttcaaagctttgtcaccaccatacgatacagagaacccttacagtgccaaagttcaggagcagctgaagatcaccaaccttcgcgtgcagctgctgaaacgacagtcttatccctgtcagagaaatgacctgaacgaagagcctcaacattttacacactatgcgatctatgatttcattgtcaagggcagctgcttctgcaatggccacgccgatcaatgcatacctgttcatggcttcagacctgtcaaggccccaggaacattccacatggtccatgggaagtgtatgtgtaagcacaacacagcaggcagccactgccagcactgtgccccgttatacaatgaccggccatgggaggcagctgatggcaaaacgggggctcccaacgagtgcagaacctgcaagtgtaatgggcatgctgatacctgtcacttcgacgttaatgtgtgggaggcatcagggaatcgtagtggtggtgtctgtgatgactgtcagcacaacacagaaggacagtattgccagaggtgcaagccaggcttctatcgtgacctgcggagacccttctcagctccagatgcttgcaaaccgtgttcctgccatccagtaggatcagctgtccttcctgccaactcagtgaccttctgcgaccccagcaatggtgactgcccttgcaagcctggggtggcagggcgacgttgtgacaggtgcatggtgggatactggggcttcggagactatggctgtcgaccatgtgactgtgcggggagctgtgaccctatcaccggagactgcatcagcagccacacagacatagactggtatcatgaagttcctgac

SEQ ID NO: 468 - protein, 458 aa, Homo sapiens
LSGVAGVSSRCEKACNPRMGNLALGRKLWADTTCGQNATELYCFYSENTDLTCRQPKCDKCNAAYPHLAHLPSAMADSSFRFPRTWWQSAEDVHREKIQLDLEAEFYFTHLIVMFKSPRPAAMVLDRSQDFGKTWKPYKYFATNCSATFGLEDDVVKKGAICTPKYSSPFPCTGGEVIFKALSPPYDTENPYSAKVQEQLKITNLRVQLLKRQSYPCQRNDLNEEPQHFTHYAIYDFIVKGSCFCNGHADQCIPVHGFRPVKAPGTFHMVHGKCMCKHNTAGSHCQHCAPLYNDRPWEAADGKTGAPNECRTCKCNGHADTCHFDVNVWEASGNRSGGVCDDCQHNTEGQYCQRCKPGFYRDLRRPFSAPDACKPCSCHPVGSAVLPANSVTFCDPSNGDCPCKPGVAGRRCDRCMVGYWGFGDYGCRPCDCAGSCDPITGDCISSHTDIDWYHEVPD

SEQ ID NO: 469 - DNA, 1374 bp, Homo sapiens
  CDS (1)..(1374)
ctgagtggagtagctggagtgagttcccgctgtgaaaaagcctgcaaccctcggatgggaaatttggctttggggcgaaaactctgggcagacaccacctgcggtcagaatgctaccgaactgtactgcttctacagtgagaacacggatctgacttgtcggcagcccaaatgtgacaagtgcaatgctgcctatcctcacctggctcacctgccatctgccatggcagactcatccttccggtttcctcgcacatggtggcagtctgcggaggatgtgcacagagaaaagatccagttagacctggaagctgaattctacttcactcacctaattgtgatgttcaagtcccccaggccggctgccatggtgctggaccgctcccaggactttgggaaaacatggaagccttataagtactttgcgactaactgctccgctacatttggcctggaagatgatgttgtcaagaagggcgctatttgtactcctaaatactccagtccttttccatgcactggaggagaggttattttcaaagctttgtcaccaccatacgatacagagaacccttacagtgccaaagttcaggagcagctgaagatcaccaaccttcgcgtgcagctgctgaaacgacagtcttatccctgtcagagaaatgacctgaacgaagagcctcaacattttacacactatgcgatctatgatttcattgtcaagggcagctgcttctgcaatggccacgccgatcaatgcatacctgttcatggcttcagacctgtcaaggccccaggaacattccacatggtccatgggaagtgtatgtgtaagcacaacacagcaggcagccactgccagcactgtgccccgttatacaatgaccggccatgggaggcagctgatggcaaaacgggggctcccaacgagtgcagaacctgcaagtgtaatgggcatgctgatacctgtcacttcgacgttaatgtgtgggaggcatcagggagtcgtagtggtggtgtctgtgatgactgtcagcacaacacagaaggacagtattgccagaggtgcaagccaggcttctatcgtgacctgcggagacccttctcagctccagatgcttgcaaaccgtgttcctgccatccagtaggatcagctgtccttcctgccaactcagtgaccttctgcgaccccagcaatggtgactgcccttgcaagcctggggtggcagggcgacgttgtgacaggtgcatggtgggatactggggcttcggagactatggctgtcgaccatgtgactgtgcggggagctgtgaccctatcaccggagactgcatcagcagccacacagacatagactggtgtcatgaagttcctgac

SEQ ID NO: 470 - protein, 458 aa, Homo sapiens
LSGVAGVSSRCEKACNPRMGNLALGRKLWADTTCGQNATELYCFYSENTDLTCRQPKCDKCNAAYPHLAHLPSAMADSSFRFPRTWWQSAEDVHREKIQLDLEAEFYFTHLIVMFKSPRPAAMVLDRSQDFGKTWKPYKYFATNCSATFGLEDDVVKKGAICTPKYSSPFPCTGGEVIFKALSPPYDTENPYSAKVQEQLKITNLRVQLLKRQSYPCQRNDLNEEPQHFTHYAIYDFIVKGSCFCNGHADQCIPVHGFRPVKAPGTFHMVHGKCMCKHNTAGSHCQHCAPLYNDRPWEAADGKTGAPNECRTCKCNGHADTCHFDVNVWEASGSRSGGVCDDCQHNTEGQYCQRCKPGFYRDLRRPFSAPDACKPCSCHPVGSAVLPANSVTFCDPSNGDCPCKPGVAGRRCDRCMVGYWGFGDYGCRPCDCAGSCDPITGDCISSHTDIDWCHEVPD

SEQ ID NO: 471 - DNA, 1374 bp, Homo sapiens
  CDS (1)..(1374)
ctgagtggagtagctggagtgagttcccgctgtgaaaaagcctgcaaccctcggatgggaaatttggctttggggcgaaaactctgggcagacaccacctgcggtcagaatgctaccgaactgtactgcttctacagtgagaacacggatctgacttgtcggcagcccaaatgtgacaagtgcaatgctgcctatcctcacctggctcacctgccatctgccatggcagactcatccttccggtttcctcgcacatggtggcagtctgcggaggatgtgcacagagaaaagatccagttagacctggaagctgaattctacttcactcacctaattgtgatgttcaagtcccccaggccggctgccatggtgctggaccgctcccaggactttgggaaaacatggaagccttataagtactttgcgactaactgctccgctacatttggcctggaagatgatgttgtcaagaagggcgctatttgtactcctaaatactccagtccttttccatgcactggaggagaggttattttcaaagctttgtcaccaccatacgatacagagaacccttacagtgccaaagttcaggagcagctgaagatcaccaaccttcgcgtgcagctgctgaaacgacagtcttatccctgtcagagaaatgacctgaacgaagagcctcaacattttacacactatgcgatctatgatttcattgtcaagggcagctgcttctgcaatggccacgccgatcaatgcatacctgttcatggcttcagacctgtcaaggccccaggaacattccacatggtccatgggaagtgtatgtgtaagcacaacacagcaggcagccactgccagcactgtgccccgttatacaatgaccggccatgggaggcagctgatggcaaaacgggggctcccaacgagtgcagaacccgcaagtgtaatgggcatgctgatacctgtcacttcgacgttaatgtgtgggaggcatcagggaatcgtagtggtggtgtctgtgatgactgtcagcacaacacagaaggacagtattgccagaggtgcaagccaggcttctatcgtgacctgcggagacccttctcagctccagatgcttgcaaaccgtgttcctgccatccagtaggatcagctgtccttcctgccaactcagtgaccttctgcgaccccagcaatggtgactgcccttgcaagcctggggtggcagggcgacgttgtgacaggtgcatggtgggatactggggcttcggagactatggctgtcgaccatgtgactgtgcggggagctgtgaccctatcaccggagactgcatcagcagccacacagacatagactggtgtcatgaagttcctgac

SEQ ID NO: 472 - protein, 458 aa, Homo sapiens
LSGVAGVSSRCEKACNPRMGNLALGRKLWADTTCGQNATELYCFYSENTDLTCRQPKCDKCNAAYPHLAHLPSAMADSSFRFPRTWWQSAEDVHREKIQLDLEAEFYFTHLIVMFKSPRPAAMVLDRSQDFGKTWKPYKYFATNCSATFGLEDDVVKKGAICTPKYSSPFPCTGGEVIFKALSPPYDTENPYSAKVQEQLKITNLRVQLLKRQSYPCQRNDLNEEPQHFTHYAIYDFIVKGSCFCNGHADQCIPVHGFRPVKAPGTFHMVHGKCMCKHNTAGSHCQHCAPLYNDRPWEAADGKTGAPNECRTRKCNGHADTCHFDVNVWEASGNRSGGVCDDCQHNTEGQYCQRCKPGFYRDLRRPFSAPDACKPCSCHPVGSAVLPANSVTFCDPSNGDCPCKPGVAGRRCDRCMVGYWGFGDYGCRPCDCAGSCDPITGDCISSHTDIDWCHEVPD

SEQ ID NO: 473 - DNA, 1374 bp, Homo sapiens
  CDS (1)..(1374)
ctgagtggagtagctggagtgagttcccgctgtgaaaaagcctgcaaccctcggatgggaaatttggctttggggcgaaaactctgggcagacaccacctgcggtcagaatgctaccgaactgtactgcttctacagtgagaacacggatctgacttgtcggcagcccaaatgtgacaagtgcaatgctgcctatcctcacctggctcacctgccatctgccatggcagactcatccttccggtttcctcgcacatggtggcagtctgcggaggatgtgcacagagaaaagatccagttagacctggaagctgaattctacttcactcacctaattgtgatgttcaagtcccccaggccggctgccatggtgctggaccgctcccaggactttgggaaaacatggaagccttataagtactttgcgactaactgctccgctacatttggcctggaagatgatgttgtcaagaagggcgctatttgtactcctaaatactccagtccttttccatgcactggaggagaggttattttcaaagctttgtcaccaccatacgatacagagaacccttacagtgccaaagttcaggagcagctgaagatcaccaaccttcgcgtgcagctgctgaaacgacagtcttatccctgtcagagaaatgacctgaacgaagagcctcaacattttacacactatgcgatctatgatttcattgtcaagggcagctgcttctgcaatggccacgccgatcaatgcatacctgttcatggcttcagacctgtcaaggccccaggaacattccacatggtccatgggaagtgtatgtgtaagcacaacacagcaggcagccactgccagcactgtgccccgttatacaatgaccggccatgggaggcagctgatggcaaaacgggggctcccaacgagtgcagagcctgcaagtgtaatgggcatgctgatacctgtcacttcgacgttaatgtgtgggaggcatcagggaatcgtagtggtggtgtctgtgatgactgtcagcacaacacagaaggacagtattgccagaggtgcaagccaggcttctatcgtgacctgcggagacccttctcagctccagatgcttgcaaaccgtgttcctgccatccagtaggatcagctgtccttcctgccaactcagtgaccttctgcgaccccagcaatggtgactgcccttgcaagcctggggtggcagggcgacgttgtgacaggtgcatggtgggatactggggcttcggagactatggctgtcgaccatgtgactgtgcggggagctgtgaccctatcaccggagactgcatcagcagccacacagacatagactggtatcatgaagttcctgac

SEQ ID NO: 474 - protein, 458 aa, Homo sapiens
LSGVAGVSSRCEKACNPRMGNLALGRKLWADTTCGQNATELYCFYSENTDLTCRQPKCDKCNAAYPHLAHLPSAMADSSFRFPRTWWQSAEDVHREKIQLDLEAEFYFTHLIVMFKSPRPAAMVLDRSQDFGKTWKPYKYFATNCSATFGLEDDVVKKGAICTPKYSSPFPCTGGEVIFKALSPPYDTENPYSAKVQEQLKITNLRVQLLKRQSYPCQRNDLNEEPQHFTHYAIYDFIVKGSCFCNGHADQCIPVHGFRPVKAPGTFHMVHGKCMCKHNTAGSHCQHCAPLYNDRPWEAADGKTGAPNECRACKCNGHADTCHFDVNVWEASGNRSGGVCDDCQHNTEGQYCQRCKPGFYRDLRRPFSAPDACKPCSCHPVGSAVLPANSVTFCDPSNGDCPCKPGVAGRRCDRCMVGYWGFGDYGCRPCDCAGSCDPITGDCISSHTDIDWYHEVPD

SEQ ID NO: 475 - DNA, 1374 bp, Homo sapiens
  CDS (1)..(1374)
ctgagtggagtagctggagtgagttcccgctgtgaaaaagcctgcaaccctcggatgggaaatttggctttggggcgaaaactctgggcagacaccacctgcggtcagaatgctaccgaactgtactgcttctacagtgagaacacggatctgacttgtcggcagcccaaatgtgacaagtgcaatgctgcctatcctcacctggctcacctgccatctgccatggcagactcatccttccggtttcctcgcacatggtggcagtctgcggaggatgtgcacagagaaaagatccagttagacctggaagctgaattctacttcactcacctaattgtgatgttcaagtcccccaggccggctgccatggtgctggaccgctcccaggactttgggaaaacatggaagccttataagtactttgcgactaactgctccgctacatttggcctggaagatgatgttgtcaagaagggcgctatttgtactcctaaatactccagtccttttccatgcactggaggagaggttattttcaaagctttgtcaccaccatacgatacagagaacccttacagtgccaaagttcaggagcagctgaagatcaccaaccttcgcgtgcagctgctgaaacgacagtcttatccctgtcagagaaatgacctgaacgaagagcctcaacattttacacactatgcgatctatgatttcattgtcaagggcagctgcttctgcaatggccacgccgatcaatgcatacctgttcatggcttcagacctgtcaaggccccaggaacattccacatggtccatgggaagtgtatgtgtaagcacaacacagcaggcagccactgccagcactgtgccccgttatacaatgaccggccatgggaggcagctgatggcaaaacgggggctcccaacgagtgcagagcctgcaagtgtaatgggcatgctgatacctgtcacttcgacgttaatgtgtgggaggcatcagggagtcgtagtggtggtgtctgtgatgactgtcagcacaacacagaaggacagtattgccagaggtgcaagccaggcttctatcgtgacctgcggagacccttctcagctccagatgcttgcaaaccgtgttcctgccatccagtaggatcagctgtccttcctgccaactcagtgaccttctgcgaccccagcaatggtgactgcccttgcaagcctggggtggcagggcgacgttgtgacaggtgcatggtgggatactggggcttcggagactatggctgtcgaccatgtgactgtgcggggagctgtgaccctatcaccggagactgcatcagcagccacacagacatagactggtgtcatgaagttcctgac

SEQ ID NO: 476 - protein, 458 aa, Homo sapiens
LSGVAGVSSRCEKACNPRMGNLALGRKLWADTTCGQNATELYCFYSENTDLTCRQPKCDKCNAAYPHLAHLPSAMADSSFRFPRTWWQSAEDVHREKIQLDLEAEFYFTHLIVMFKSPRPAAMVLDRSQDFGKTWKPYKYFATNCSATFGLEDDVVKKGAICTPKYSSPFPCTGGEVIFKALSPPYDTENPYSAKVQEQLKITNLRVQLLKRQSYPCQRNDLNEEPQHFTHYAIYDFIVKGSCFCNGHADQCIPVHGFRPVKAPGTFHMVHGKCMCKHNTAGSHCQHCAPLYNDRPWEAADGKTGAPNECRACKCNGHADTCHFDVNVWEASGSRSGGVCDDCQHNTEGQYCQRCKPGFYRDLRRPFSAPDACKPCSCHPVGSAVLPANSVTFCDPSNGDCPCKPGVAGRRCDRCMVGYWGFGDYGCRPCDCAGSCDPITGDCISSHTDIDWCHEVPD

SEQ ID NO: 477 - DNA, 1374 bp, Homo sapiens
  CDS (1)..(1374)
ctgagtggagtagctggagtgagttcccgctgtgaaaaagcctgcaaccctcggatgggaaatttggctttggggcgaaaactctgggcagacaccacctgcggtcagaatgctaccgaactgtactgcttctacagtgagaacacggatctgacttgtcggcagcccaaatgtgacaagtgcaatgctgcctatcctcacctggctcacctgccatctgccatggcagactcatccttccggtttcctcgcacatggtggcagtctgcggaggatgtgcacagagaaaagatccagttagacctggaagctgaattctacttcactcacctaattgtgatgttcaagtcccccaggccggctgccatggtgctggaccgctcccaggactttgggaaaacatggaagccttataagtactttgcgactaactgctccgctacatttggcctggaagatgatgttgtcaagaagggcgctatttgtactcctaaatactccagtccttttccatgcactggaggagaggttattttcaaagctttgtcaccaccatacgatacagagaacccttacagtgccaaagttcaggagcagctgaagatcaccaaccttcgcgtgcagctgctgaaacgacagtcttatccctgtcagagaaatgacctgaacgaagagcctcaacattttacacactatgcgatctatgatttcattgtcaagggcagctgcttctgcaatggccacgccgatcaatgcatacctgttcatggcttcagacctgtcaaggccccaggaacattccacatggtccatgggaagtgtatgtgtaagcacaacacagcaggcagccactgccagcactgtgccccgttatacaatgaccggccatgggaggcagctgatggcaaaacgggggctcccaacgagtgcagagcccgcaagtgtaatgggcatgctgatacctgtcacttcgacgttaatgtgtgggaggcatcagggaatcgtagtggtggtgtctgtgatgactgtcagcacaacacagaaggacagtattgccagaggtgcaagccaggcttctatcgtgacctgcggagacccttctcagctccagatgcttgcaaaccgtgttcctgccatccagtaggatcagctgtccttcctgccaactcagtgaccttctgcgaccccagcaatggtgactgcccttgcaagcctggggtggcagggcgacgttgtgacaggtgcatggtgggatactggggcttcggagactatggctgtcgaccatgtgactgtgcggggagctgtgaccctatcaccggagactgcatcagcagccacacagacatagactggtgtcatgaagttcctgac

SEQ ID NO: 478 - protein, 458 aa, Homo sapiens
LSGVAGVSSRCEKACNPRMGNLALGRKLWADTTCGQNATELYCFYSENTDLTCRQPKCDKCNAAYPHLAHLPSAMADSSFRFPRTWWQSAEDVHREKIQLDLEAEFYFTHLIVMFKSPRPAAMVLDRSQDFGKTWKPYKYFATNCSATFGLEDDVVKKGAICTPKYSSPFPCTGGEVIFKALSPPYDTENPYSAKVQEQLKITNLRVQLLKRQSYPCQRNDLNEEPQHFTHYAIYDFIVKGSCFCNGHADQCIPVHGFRPVKAPGTFHMVHGKCMCKHNTAGSHCQHCAPLYNDRPWEAADGKTGAPNECRARKCNGHADTCHFDVNVWEASGNRSGGVCDDCQHNTEGQYCQRCKPGFYRDLRRPFSAPDACKPCSCHPVGSAVLPANSVTFCDPSNGDCPCKPGVAGRRCDRCMVGYWGFGDYGCRPCDCAGSCDPITGDCISSHTDIDWCHEVPD

SEQ ID NO: 479 - DNA, 1374 bp, Homo sapiens
  CDS (1)..(1374)
ctgagtggagtagctggagtgagttcccgctgtgaaaaagcctgcaaccctcggatgggaaatttggctttggggcgaaaactctgggcagacaccacctgcggtcagaatgctaccgaactgtactgcttctacagtgagaacacggatctgacttgtcggcagcccaaatgtgacaagtgcaatgctgcctatcctcacctggctcacctgccatctgccatggcagactcatccttccggtttcctcgcacatggtggcagtctgcggaggatgtgcacagagaaaagatccagttagacctggaagctgaattctacttcactcacctaattgtgatgttcaagtcccccaggccggctgccatggtgctggaccgctcccaggactttgggaaaacatggaagccttataagtactttgcgactaactgctccgctacatttggcctggaagatgatgttgtcaagaagggcgctatttgtactcctaaatactccagtccttttccatgcactggaggagaggttattttcaaagctttgtcaccaccatacgatacagagaacccttacagtgccaaagttcaggagcagctgaagatcaccaaccttcgcgtgcagctgctgaaacgacagtcttatccctgtcagagaaatgacctgaacgaagagcctcaacattttacacactatgcgatctatgatttcattgtcaagggcagctgcttctgcaatggccacgccgatcaatgcatacctgttcatggcttcagacctgtcaaggccccaggaacattccacatggtccatgggaagtgtatgtgtaagcacaacacagcaggcagccactgccagcactgtgccccgttatacaatgaccggccatgggaggcagctgatggcaaaacgggggctcccaacgagtgcagaacctgcaagtgtaatgggcatgctgatacctgtcacttcgacgttaatgtgtgggaggcatcagggaatcgtagtggtggtgtctgtgatgactgtcagcacaacacagaaggacagtattgccagaggtgcaagccaggcttctatcgtgacctgcggagacccttctcagctccagatgcttgcaaaccgtgttcctgccatccagtaggatcagctgtccttcctgccaactcagtgaccttctgcgaccccagcaatggtgactgcccttgcaagcctggggtggcagggcgacgttgtgacaggtgcatggtgggatactggggcttcggagactatggctgtcgaccatgtgactgtgcggggagctgtgaccctatcaccggagactgcatcagcagccacacagacatagactggtgtcatgaagttcctgac

SEQ ID NO: 480 - protein, 458 aa, Homo sapiens
LSGVAGVSSRCEKACNPRMGNLALGRKLWADTTCGQNATELYCFYSENTDLTCRQPKCDKCNAAYPHLAHLPSAMADSSFRFPRTWWQSAEDVHREKIQLDLEAEFYFTHLIVMFKSPRPAAMVLDRSQDFGKTWKPYKYFATNCSATFGLEDDVVKKGAICTPKYSSPFPCTGGEVIFKALSPPYDTENPYSAKVQEQLKITNLRVQLLKRQSYPCQRNDLNEEPQHFTHYAIYDFIVKGSCFCNGHADQCIPVHGFRPVKAPGTFHMVHGKCMCKHNTAGSHCQHCAPLYNDRPWEAADGKTGAPNECRTCKCNGHADTCHFDVNVWEASGNRSGGVCDDCQHNTEGQYCQRCKPGFYRDLRRPFSAPDACKPCSCHPVGSAVLPANSVTFCDPSNGDCPCKPGVAGRRCDRCMVGYWGFGDYGCRPCDCAGSCDPITGDCISSHTDIDWCHEVPD

SEQ ID NO: 481 - DNA, 1374 bp, Homo sapiens
  CDS (1)..(1374)
ctgagtggagtagctggagtgagttcccgctgtgaaaaagcctgcaaccctcggatgggaaatttggctttggggcgaaaactctgggcagacaccacctgcggtcagaatgctaccgaactgtactgcttctacagtgagaacacggatctgacttgtcggcagcccaaatgtgacaagtgcaatgctgcctatcctcacctggctcacctgccatctgccatggcagactcatccttccggtttcctcgcacatggtggcagtctgcggaggatgtgcacagagaaaagatccagttagacctggaagctgaattctacttcactcacctaattgtgatgttcaagtcccccaggccggctgccatggtgctggaccgctcccaggactttgggaaaacatggaagccttataagtactttgcgactaactgctccgctacatttggcctggaagatgatgttgtcaagaagggcgctatttgtactcctaaatactccagtccttttccatgcactggaggagaggttattttcaaagctttgtcaccaccatacgatacagagaacccttacagtgccaaagttcaggagcagctgaagatcaccaaccttcgcgtgcagctgctgaaacgacagtcttatccctgtcagagaaatgacctgaacgaagagcctcaacattttacacactatgcgatctatgatttcattgtcaagggcagctgcttctgcaatggccacgccgatcaatgcatacctgttcatggcttcagacctgtcaaggccccaggaacattccacatggtccatgggaagtgtatgtgtaagcacaacacagcaggcagccactgccagcactgtgccccgttatacaatgaccggccatgggaggcagctgatggcaaaacgggggctcccaacgagtgcagagcctgcaagtgtaatgggcatgctgatacctgtcacttcgacgttaatgtgtgggaggcatcagggaatcgtagtggtggtgtctgtgatgactgtcagcacaacacagaaggacagtattgccagaggtgcaagccaggcttctatcgtgacctgcggagacccttctcagctccagatgcttgcaaaccgtgttcctgccatccagtaggatcagctgtccttcctgccaactcagtgaccttctgcgaccccagcaatggtgactgcccttgcaagcctggggtggcagggcgacgttgtgacaggtgcatggtgggatactggggcttcggagactatggctgtcgaccatgtgactgtgcggggagctgtgaccctatcaccggagactgcatcagcagccacacagacatagactggtgtcatgaagttcctgac

SEQ ID NO: 482 - protein, 458 aa, Homo sapiens
LSGVAGVSSRCEKACNPRMGNLALGRKLWADTTCGQNATELYCFYSENTDLTCRQPKCDKCNAAYPHLAHLPSAMADSSFRFPRTWWQSAEDVHREKIQLDLEAEFYFTHLIVMFKSPRPAAMVLDRSQDFGKTWKPYKYFATNCSATFGLEDDVVKKGAICTPKYSSPFPCTGGEVIFKALSPPYDTENPYSAKVQEQLKITNLRVQLLKRQSYPCQRNDLNEEPQHFTHYAIYDFIVKGSCFCNGHADQCIPVHGFRPVKAPGTFHMVHGKCMCKHNTAGSHCQHCAPLYNDRPWEAADGKTGAPNECRACKCNGHADTCHFDVNVWEASGNRSGGVCDDCQHNTEGQYCQRCKPGFYRDLRRPFSAPDACKPCSCHPVGSAVLPANSVTFCDPSNGDCPCKPGVAGRRCDRCMVGYWGFGDYGCRPCDCAGSCDPITGDCISSHTDIDWCHEVPD

SEQ ID NO: 483 - DNA, 1374 bp, Homo sapiens
  CDS (1)..(1374)
ctgagtggagtagctggagtgagttcccgctgtgaaaaagcctgcaaccctcggatgggaaatttggctttggggcgaaaactctgggcagacaccacctgcggtcagaatgctaccgaactgtactgcttctacagtgagaacaaggatctgacttgtcggcagcccaaatgtgacaagtgcaatgctgcctatcctcacctggctcacctgccatctgccatggcagactcatccttccggtttcctcgcacatggtggcagtctgcggaggatgtgcacagagaaaagatccagttagacctggaagctgaattctacttcactcacctaattgtgatgttcaagtcccccaggccggctgccatggtgctggaccgctcccaggactttgggaaaacatggaagccttataagtactttgcgactaactgctccgctacatttggcctggaagatgatgttgtcaagaagggcgctatttgtacttctaaatactccagtccttttccatgcactggaggagaggttattttcaaagctttgtcaccaccacacgatacagagaacccttacagtgccaaagttcaggagcagctgaagatcaccaaccttcgcgtgcagctgctgaaacgacagtcttgtccctgtcagagaaatgacctgaacgaagagcctcaacattttacacactatgcgatctatgatttcattgtcaagggcagctgcttctgcaatggccacgccgatcaatgcatacctgttcatggcttcagacctgtcaaggccccaggaacattccacatggtccatgggaagtgtatgtgtaagcacaacacagcaggcagccactgccagcactgtgccccgttatacaatgaccggccatgggaggcagctgatggcaaaacgggggctcccaacgagtgcagaacctgcaagtgtaatgggcatgctgatacctgtcacttcgacgttaatgtgtgggaggcatcagggaatcgtagtggtggtgtctgtgatgactgtcagcacaacacagaaggacagtattgccagaggtgcaagccaggcttctatcgtgacctgcggagacccttctcagctccagatgcttgcaaaccgtgttcctgccatccagtaggatcagctgtccttcctgccaactcagtgaccttctgcgaccccagcaatggtgactgcccttgcaagcctggggtggcagggcgacgttgtgacaggtgcatggtgggatactggggcttcggagactatggctgtcgaccatgtgactgtgcggggagctgtgaccctatcaccggagactgcatcagcagccacacagacatagactggtgtcatgaagttcctgac

SEQ ID NO: 484 - protein, 458 aa, Homo sapiens
LSGVAGVSSRCEKACNPRMGNLALGRKLWADTTCGQNATELYCFYSENKDLTCRQPKCDKCNAAYPHLAHLPSAMADSSFRFPRTWWQSAEDVHREKIQLDLEAEFYFTHLIVMFKSPRPAAMVLDRSQDFGKTWKPYKYFATNCSATFGLEDDVVKKGAICTSKYSSPFPCTGGEVIFKALSPPHDTENPYSAKVQEQLKITNLRVQLLKRQSCPCQRNDLNEEPQHFTHYAIYDFIVKGSCFCNGHADQCIPVHGFRPVKAPGTFHMVHGKCMCKHNTAGSHCQHCAPLYNDRPWEAADGKTGAPNECRTCKCNGHADTCHFDVNVWEASGNRSGGVCDDCQHNTEGQYCQRCKPGFYRDLRRPFSAPDACKPCSCHPVGSAVLPANSVTFCDPSNGDCPCKPGVAGRRCDRCMVGYWGFGDYGCRPCDCAGSCDPITGDCISSHTDIDWCHEVPD

SEQ ID NO: 485 - DNA, 1374 bp, Homo sapiens
  CDS (1)..(1374)
ctgagtggagtagctggagtgagttcccgctgtgaaaaagcctgcaaccctcggatgggaaatttggctttggggcgaaaactctgggcagacaccacctgcggtcagaatgctaccgaactgtactgcttctacagtgagaacaaggatctgacttgtcggcagcccaaatgtgacaagtgcaatgctgcctatcctcacctggctcacctgccatctgccatggcagactcatccttccggtttcctcgcacatggtggcagtctgcggaggatgtgcacagagaaaagatccagttagacctggaagctgaattctacttcactcacctaattgtgatgttcaagtcccccaggccggctgccatggtgctggaccgctcccaggactttgggaaaacatggaagccttataagtactttgcgactaactgctccgctacatttggcctggaagatgatgttgtcaagaagggcgctatttgtacttctaaatactccagtccttttccatgcactggaggagaggttattttcaaagctttgtcaccaccacacgatacagagaacccttacagtgccaaagttcaggagcagctgaagatcaccaaccttcgcgtgcagctgctgaaacgacagtcttgtccctgtcagagaaatgacctgaacgaagagcctcaacattttacacactatgcgatctatgatttcattgtcaagggcagctgcttctgcaatggccacgccgatcaatgcatacctgttcatggcttcagacctgtcaaggccccaggaacattccacatggtccatgggaagtgtatgtgtaagcacaacacagcaggcagccactgccagcactgtgccccgttatacaatgaccggccatgggaggcagctgatggcaaaacgggggctcccaacgagtgcagagcccgcaagtgtaatgggcatgctgatacctgtcacttcgacgttaatgtgtgggaggcatcagggaatcgtagtggtggtgtctgtgatgactgtcagcacaacacagaaggacagtattgccagaggtgcaagccaggcttctatcgtgacctgcggagacccttctcagctccagatgcttgcaaaccgtgttcctgccatccagtaggatcagctgtccttcctgccaactcagtgaccttctgcgaccccagcaatggtgactgcccttgcaagcctggggtggcagggcgacgttgtgacaggtgcatggtgggatactggggcttcggagactatggctgtcgaccatgtgactgtgcggggagctgtgaccctatcaccggagactgcatcagcagccacacagacatagactggtgtcatgaagttcctgac

SEQ ID NO: 486 - protein, 458 aa, Homo sapiens
LSGVAGVSSRCEKACNPRMGNLALGRKLWADTTCGQNATELYCFYSENKDLTCRQPKCDKCNAAYPHLAHLPSAMADSSFRFPRTWWQSAEDVHREKIQLDLEAEFYFTHLIVMFKSPRPAAMVLDRSQDFGKTWKPYKYFATNCSATFGLEDDVVKKGAICTSKYSSPFPCTGGEVIFKALSPPHDTENPYSAKVQEQLKITNLRVQLLKRQSCPCQRNDLNEEPQHFTHYAIYDFIVKGSCFCNGHADQCIPVHGFRPVKAPGTFHMVHGKCMCKHNTAGSHCQHCAPLYNDRPWEAADGKTGAPNECRARKCNGHADTCHFDVNVWEASGNRSGGVCDDCQHNTEGQYCQRCKPGFYRDLRRPFSAPDACKPCSCHPVGSAVLPANSVTFCDPSNGDCPCKPGVAGRRCDRCMVGYWGFGDYGCRPCDCAGSCDPITGDCISSHTDIDWCHEVPD

SEQ ID NO: 487 - DNA, 1374 bp, Homo sapiens
  CDS (1)..(1374)
ctgagtggagtagctggagtgagttcccgctgtgaaaaagcctgcaaccctcggatgggaaatttggctttggggcgaaaactctgggcagacaccacctgcggtcagaatgctaccgaactgtactgcttctacagtgagaacaaggatctgacttgtcggcagcccaaatgtgacaagtgcaatgctgcctatcctcacctggctcacctgccatctgccatggcagactcatccttccggtttcctcgcacatggtggcagtctgcggaggatgtgcacagagaaaagatccagttagacctggaagctgaattctacttcactcacctaattgtgatgttcaagtcccccaggccggctgccatggtgctggaccgctcccaggactttgggaaaacatggaagccttataagtactttgcgactaactgctccgctacatttggcctggaagatgatgttgtcaagaagggcgctatttgtacttctaaatactccagtccttttccatgcactggaggagaggttattttcaaagctttgtcaccaccacacgatacagagaacccttacagtgccaaagttcaggagcagctgaagatcaccaaccttcgcgtgcagctgctgaaacgacagtcttgtccctgtcagagaaatgacctgaacgaagagcctcaacattttacacactatgcgatctatgatttcattgtcaagggcagctgcttctgcaatggccacgccgatcaatgcatacctgttcatggcttcagacctgtcaaggccccaggaacattccacatggtccatgggaagtgtatgtgtaagcacaacacagcaggcagccactgccagcactgtgccccgttatacaatgaccggccatgggaggcagctgatggcaaaacgggggctcccaacgagtgcagagcctgcaagtgtaatgggcatgctgatacctgtcacttcgacgttaatgtgtgggaggcatcagggagtcgtagtggtggtgtctgtgatgactgtcagcacaacacagaaggacagtattgccagaggtgcaagccaggcttctatcgtgacctgcggagacccttctcagctccagatgcttgcaaaccgtgttcctgccatccagtaggatcagctgtccttcctgccaactcagtgaccttctgcgaccccagcaatggtgactgcccttgcaagcctggggtggcagggcgacgttgtgacaggtgcatggtgggatactggggcttcggagactatggctgtcgaccatgtgactgtgcggggagctgtgaccctatcaccggagactgcatcagcagccacacagacatagactggtgtcatgaagttcctgac

SEQ ID NO: 488 - protein, 458 aa, Homo sapiens
LSGVAGVSSRCEKACNPRMGNLALGRKLWADTTCGQNATELYCFYSENKDLTCRQPKCDKCNAAYPHLAHLPSAMADSSFRFPRTWWQSAEDVHREKIQLDLEAEFYFTHLIVMFKSPRPAAMVLDRSQDFGKTWKPYKYFATNCSATFGLEDDVVKKGAICTSKYSSPFPCTGGEVIFKALSPPHDTENPYSAKVQEQLKITNLRVQLLKRQSCPCQRNDLNEEPQHFTHYAIYDFIVKGSCFCNGHADQCIPVHGFRPVKAPGTFHMVHGKCMCKHNTAGSHCQHCAPLYNDRPWEAADGKTGAPNECRACKCNGHADTCHFDVNVWEASGSRSGGVCDDCQHNTEGQYCQRCKPGFYRDLRRPFSAPDACKPCSCHPVGSAVLPANSVTFCDPSNGDCPCKPGVAGRRCDRCMVGYWGFGDYGCRPCDCAGSCDPITGDCISSHTDIDWCHEVPD

SEQ ID NO: 489 - DNA, 1374 bp, Homo sapiens
  CDS (1)..(1374)
ctgagtggagtagctggagtgagttcccgctgtgaaaaagcctgcaaccctcggatgggaaatttggctttggggcgaaaactctgggcagacaccacctgcggtcagaatgctaccgaactgtactgcttctacagtgagaacaaggatctgacttgtcggcagcccaaatgtgacaagtgcaatgctgcctatcctcacctggctcacctgccatctgccatggcagactcatccttccggtttcctcgcacatggtggcagtctgcggaggatgtgcacagagaaaagatccagttagacctggaagctgaattctacttcactcacctaattgtgatgttcaagtcccccaggccggctgccatggtgctggaccgctcccaggactttgggaaaacatggaagccttataagtactttgcgactaactgctccgctacatttggcctggaagatgatgttgtcaagaagggcgctatttgtacttctaaatactccagtccttttccatgcactggaggagaggttattttcaaagctttgtcaccaccacacgatacagagaacccttacagtgccaaagttcaggagcagctgaagatcaccaaccttcgcgtgcagctgctgaaacgacagtcttgtccctgtcagagaaatgacctgaacgaagagcctcaacattttacacactatgcgatctatgatttcattgtcaagggcagctgcttctgcaatggccacgccgatcaatgcatacctgttcatggcttcagacctgtcaaggccccaggaacattccacatggtccatgggaagtgtatgtgtaagcacaacacagcaggcagccactgccagcactgtgccccgttatacaatgaccggccatgggaggcagctgatggcaaaacgggggctcccaacgagtgcagagcctgcaagtgtaatgggcatgctgatacctgtcacttcgacgttaatgtgtgggaggcatcagggaatcgtagtggtggtgtctgtgatgactgtcagcacaacacagaaggacagtattgccagaggtgcaagccaggcttctatcgtgacctgcggagacccttctcagctccagatgcttgcaaaccgtgttcctgccatccagtaggatcagctgtccttcctgccaactcagtgaccttctgcgaccccagcaatggtgactgcccttgcaagcctggggtggcagggcgacgttgtgacaggtgcatggtgggatactggggcttcggagactatggctgtcgaccatgtgactgtgcggggagctgtgaccctatcaccggagactgcatcagcagccacacagacatagactggtatcatgaagttcctgac

SEQ ID NO: 490 - protein, 458 aa, Homo sapiens
LSGVAGVSSRCEKACNPRMGNLALGRKLWADTTCGQNATELYCFYSENKDLTCRQPKCDKCNAAYPHLAHLPSAMADSSFRFPRTWWQSAEDVHREKIQLDLEAEFYFTHLIVMFKSPRPAAMVLDRSQDFGKTWKPYKYFATNCSATFGLEDDVVKKGAICTSKYSSPFPCTGGEVIFKALSPPHDTENPYSAKVQEQLKITNLRVQLLKRQSCPCQRNDLNEEPQHFTHYAIYDFIVKGSCFCNGHADQCIPVHGFRPVKAPGTFHMVHGKCMCKHNTAGSHCQHCAPLYNDRPWEAADGKTGAPNECRACKCNGHADTCHFDVNVWEASGNRSGGVCDDCQHNTEGQYCQRCKPGFYRDLRRPFSAPDACKPCSCHPVGSAVLPANSVTFCDPSNGDCPCKPGVAGRRCDRCMVGYWGFGDYGCRPCDCAGSCDPITGDCISSHTDIDWYHEVPD

SEQ ID NO: 491 - DNA, 1374 bp, Homo sapiens
  CDS (1)..(1374)
ctgagtggagtagctggagtgagttcccgctgtgaaaaagcctgcaaccctcggatgggaaatttggctttggggcgaaaactctgggcagacaccacctgcggtcagaatgctaccgaactgtactgcttctacagtgagaacaaggatctgacttgtcggcagcccaaatgtgacaagtgcaatgctgcctatcctcacctggctcacctgccatctgccatggcagactcatccttccggtttcctcgcacatggtggcagtctgcggaggatgtgcacagagaaaagatccagttagacctggaagctgaattctacttcactcacctaattgtgatgttcaagtcccccaggccggctgccatggtgctggaccgctcccaggactttgggaaaacatggaagccttataagtactttgcgactaactgctccgctacatttggcctggaagatgatgttgtcaagaagggcgctatttgtacttctaaatactccagtccttttccatgcactggaggagaggttattttcaaagctttgtcaccaccacacgatacagagaacccttacagtgccaaagttcaggagcagctgaagatcaccaaccttcgcgtgcagctgctgaaacgacagtcttgtccctgtcagagaaatgacctgaacgaagagcctcaacattttacacactatgcgatctatgatttcattgtcaagggcagctgcttctgcaatggccacgccgatcaatgcatacctgttcatggcttcagacctgtcaaggccccaggaacattccacatggtccatgggaagtgtatgtgtaagcacaacacagcaggcagccactgccagcactgtgccccgttatacaatgaccggccatgggaggcagctgatggcaaaacgggggctcccaacgagtgcagaacccgcaagtgtaatgggcatgctgatacctgtcacttcgacgttaatgtgtgggaggcatcagggaatcgtagtggtggtgtctgtgatgactgtcagcacaacacagaaggacagtattgccagaggtgcaagccaggcttctatcgtgacctgcggagacccttctcagctccagatgcttgcaaaccgtgttcctgccatccagtaggatcagctgtccttcctgccaactcagtgaccttctgcgaccccagcaatggtgactgcccttgcaagcctggggtggcagggcgacgttgtgacaggtgcatggtgggatactggggcttcggagactatggctgtcgaccatgtgactgtgcggggagctgtgaccctatcaccggagactgcatcagcagccacacagacatagactggtgtcatgaagttcctgac

SEQ ID NO: 492 - protein, 458 aa, Homo sapiens
LSGVAGVSSRCEKACNPRMGNLALGRKLWADTTCGQNATELYCFYSENKDLTCRQPKCDKCNAAYPHLAHLPSAMADSSFRFPRTWWQSAEDVHREKIQLDLEAEFYFTHLIVMFKSPRPAAMVLDRSQDFGKTWKPYKYFATNCSATFGLEDDVVKKGAICTSKYSSPFPCTGGEVIFKALSPPHDTENPYSAKVQEQLKITNLRVQLLKRQSCPCQRNDLNEEPQHFTHYAIYDFIVKGSCFCNGHADQCIPVHGFRPVKAPGTFHMVHGKCMCKHNTAGSHCQHCAPLYNDRPWEAADGKTGAPNECRTRKCNGHADTCHFDVNVWEASGNRSGGVCDDCQHNTEGQYCQRCKPGFYRDLRRPFSAPDACKPCSCHPVGSAVLPANSVTFCDPSNGDCPCKPGVAGRRCDRCMVGYWGFGDYGCRPCDCAGSCDPITGDCISSHTDIDWCHEVPD

SEQ ID NO: 493 - DNA, 1374 bp, Homo sapiens
  CDS (1)..(1374)
ctgagtggagtagctggagtgagttcccgctgtgaaaaagcctgcaaccctcggatgggaaatttggctttggggcgaaaactctgggcagacaccacctgcggtcagaatgctaccgaactgtactgcttctacagtgagaacaaggatctgacttgtcggcagcccaaatgtgacaagtgcaatgctgcctatcctcacctggctcacctgccatctgccatggcagactcatccttccggtttcctcgcacatggtggcagtctgcggaggatgtgcacagagaaaagatccagttagacctggaagctgaattctacttcactcacctaattgtgatgttcaagtcccccaggccggctgccatggtgctggaccgctcccaggactttgggaaaacatggaagccttataagtactttgcgactaactgctccgctacatttggcctggaagatgatgttgtcaagaagggcgctatttgtacttctaaatactccagtccttttccatgcactggaggagaggttattttcaaagctttgtcaccaccacacgatacagagaacccttacagtgccaaagttcaggagcagctgaagatcaccaaccttcgcgtgcagctgctgaaacgacagtcttgtccctgtcagagaaatgacctgaacgaagagcctcaacattttacacactatgcgatctatgatttcattgtcaagggcagctgcttctgcaatggccacgccgatcaatgcatacctgttcatggcttcagacctgtcaaggccccaggaacattccacatggtccatgggaagtgtatgtgtaagcacaacacagcaggcagccactgccagcactgtgccccgttatacaatgaccggccatgggaggcagctgatggcaaaacgggggctcccaacgagtgcagaacctgcaagtgtaatgggcatgctgatacctgtcacttcgacgttaatgtgtgggaggcatcagggagtcgtagtggtggtgtctgtgatgactgtcagcacaacacagaaggacagtattgccagaggtgcaagccaggcttctatcgtgacctgcggagacccttctcagctccagatgcttgcaaaccgtgttcctgccatccagtaggatcagctgtccttcctgccaactcagtgaccttctgcgaccccagcaatggtgactgcccttgcaagcctggggtggcagggcgacgttgtgacaggtgcatggtgggatactggggcttcggagactatggctgtcgaccatgtgactgtgcggggagctgtgaccctatcaccggagactgcatcagcagccacacagacatagactggtgtcatgaagttcctgac

SEQ ID NO: 494 - protein, 458 aa, Homo sapiens
LSGVAGVSSRCEKACNPRMGNLALGRKLWADTTCGQNATELYCFYSENKDLTCRQPKCDKCNAAYPHLAHLPSAMADSSFRFPRTWWQSAEDVHREKIQLDLEAEFYFTHLIVMFKSPRPAAMVLDRSQDFGKTWKPYKYFATNCSATFGLEDDVVKKGAICTSKYSSPFPCTGGEVIFKALSPPHDTENPYSAKVQEQLKITNLRVQLLKRQSCPCQRNDLNEEPQHFTHYAIYDFIVKGSCFCNGHADQCIPVHGFRPVKAPGTFHMVHGKCMCKHNTAGSHCQHCAPLYNDRPWEAADGKTGAPNECRTCKCNGHADTCHFDVNVWEASGSRSGGVCDDCQHNTEGQYCQRCKPGFYRDLRRPFSAPDACKPCSCHPVGSAVLPANSVTFCDPSNGDCPCKPGVAGRRCDRCMVGYWGFGDYGCRPCDCAGSCDPITGDCISSHTDIDWCHEVPD

SEQ ID NO: 495 - DNA, 1374 bp, Homo sapiens
  CDS (1)..(1374)
ctgagtggagtagctggagtgagttcccgctgtgaaaaagcctgcaaccctcggatgggaaatttggctttggggcgaaaactctgggcagacaccacctgcggtcagaatgctaccgaactgtactgcttctacagtgagaacaaggatctgacttgtcggcagcccaaatgtgacaagtgcaatgctgcctatcctcacctggctcacctgccatctgccatggcagactcatccttccggtttcctcgcacatggtggcagtctgcggaggatgtgcacagagaaaagatccagttagacctggaagctgaattctacttcactcacctaattgtgatgttcaagtcccccaggccggctgccatggtgctggaccgctcccaggactttgggaaaacatggaagccttataagtactttgcgactaactgctccgctacatttggcctggaagatgatgttgtcaagaagggcgctatttgtacttctaaatactccagtccttttccatgcactggaggagaggttattttcaaagctttgtcaccaccacacgatacagagaacccttacagtgccaaagttcaggagcagctgaagatcaccaaccttcgcgtgcagctgctgaaacgacagtcttgtccctgtcagagaaatgacctgaacgaagagcctcaacattttacacactatgcgatctatgatttcattgtcaagggcagctgcttctgcaatggccacgccgatcaatgcatacctgttcatggcttcagacctgtcaaggccccaggaacattccacatggtccatgggaagtgtatgtgtaagcacaacacagcaggcagccactgccagcactgtgccccgttatacaatgaccggccatgggaggcagctgatggcaaaacgggggctcccaacgagtgcagaacctgcaagtgtaatgggcatgctgatacctgtcacttcgacgttaatgtgtgggaggcatcagggaatcgtagtggtggtgtctgtgatgactgtcagcacaacacagaaggacagtattgccagaggtgcaagccaggcttctatcgtgacctgcggagacccttctcagctccagatgcttgcaaaccgtgttcctgccatccagtaggatcagctgtccttcctgccaactcagtgaccttctgcgaccccagcaatggtgactgcccttgcaagcctggggtggcagggcgacgttgtgacaggtgcatggtgggatactggggcttcggagactatggctgtcgaccatgtgactgtgcggggagctgtgaccctatcaccggagactgcatcagcagccacacagacatagactggtatcatgaagttcctgac

SEQ ID NO: 496 - protein, 458 aa, Homo sapiens
LSGVAGVSSRCEKACNPRMGNLALGRKLWADTTCGQNATELYCFYSENKDLTCRQPKCDKCNAAYPHLAHLPSAMADSSFRFPRTWWQSAEDVHREKIQLDLEAEFYFTHLIVMFKSPRPAAMVLDRSQDFGKTWKPYKYFATNCSATFGLEDDVVKKGAICTSKYSSPFPCTGGEVIFKALSPPHDTENPYSAKVQEQLKITNLRVQLLKRQSCPCQRNDLNEEPQHFTHYAIYDFIVKGSCFCNGHADQCIPVHGFRPVKAPGTFHMVHGKCMCKHNTAGSHCQHCAPLYNDRPWEAADGKTGAPNECRTCKCNGHADTCHFDVNVWEASGNRSGGVCDDCQHNTEGQYCQRCKPGFYRDLRRPFSAPDACKPCSCHPVGSAVLPANSVTFCDPSNGDCPCKPGVAGRRCDRCMVGYWGFGDYGCRPCDCAGSCDPITGDCISSHTDIDWYHEVPD

SEQ ID NO: 497 - DNA, 1374 bp, Homo sapiens
  CDS (1)..(1374)
ctgagtggagtagctggagtgagttcccgctgtgaaaaagcctgcaaccctcggatgggaaatttggctttggggcgaaaactctgggcagacaccacctgcggtcagaatgctaccgaactgtactgcttctacagtgagaacaaggatctgacttgtcggcagcccaaatgtgacaagtgcaatgctgcctatcctcacctggctcacctgccatctgccatggcagactcatccttccggtttcctcgcacatggtggcagtctgcggaggatgtgcacagagaaaagatccagttagacctggaagctgaattctacttcactcacctaattgtgatgttcaagtcccccaggccggctgccatggtgctggaccgctcccaggactttgggaaaacatggaagccttataagtactttgcgactaactgctccgctacatttggcctggaagatgatgttgtcaagaagggcgctatttgtacttctaaatactccagtccttttccatgcactggaggagaggttattttcaaagctttgtcaccaccacacgatacagagaacccttacagtgccaaagttcaggagcagctgaagatcaccaaccttcgcgtgcagctgctgaaacgacagtcttgtccctgtcagagaaatgacctgaacgaagagcctcaacattttacacactatgcgatctatgatttcattgtcaagggcagctgcttctgcaatggccacgccgatcaatgcatacctgttcatggcttcagacctgtcaaggccccaggaacattccacatggtccatgggaagtgtatgtgtaagcacaacacagcaggcagccactgccagcactgtgccccgttatacaatgaccggccatgggaggcagctgatggcaaaacgggggctcccaacgagtgcagaacccgcaagtgtaatgggcatgctgatacctgtcacttcgacgttaatgtgtgggaggcatcagggagtcgtagtggtggtgtctgtgatgactgtcagcacaacacagaaggacagtattgccagaggtgcaagccaggcttctatcgtgacctgcggagacccttctcagctccagatgcttgcaaaccgtgttcctgccatccagtaggatcagctgtccttcctgccaactcagtgaccttctgcgaccccagcaatggtgactgcccttgcaagcctggggtggcagggcgacgttgtgacaggtgcatggtgggatactggggcttcggagactatggctgtcgaccatgtgactgtgcggggagctgtgaccctatcaccggagactgcatcagcagccacacagacatagactggtgtcatgaagttcctgac

SEQ ID NO: 498 - protein, 458 aa, Homo sapiens
LSGVAGVSSRCEKACNPRMGNLALGRKLWADTTCGQNATELYCFYSENKDLTCRQPKCDKCNAAYPHLAHLPSAMADSSFRFPRTWWQSAEDVHREKIQLDLEAEFYFTHLIVMFKSPRPAAMVLDRSQDFGKTWKPYKYFATNCSATFGLEDDVVKKGAICTSKYSSPFPCTGGEVIFKALSPPHDTENPYSAKVQEQLKITNLRVQLLKRQSCPCQRNDLNEEPQHFTHYAIYDFIVKGSCFCNGHADQCIPVHGFRPVKAPGTFHMVHGKCMCKHNTAGSHCQHCAPLYNDRPWEAADGKTGAPNECRTRKCNGHADTCHFDVNVWEASGSRSGGVCDDCQHNTEGQYCQRCKPGFYRDLRRPFSAPDACKPCSCHPVGSAVLPANSVTFCDPSNGDCPCKPGVAGRRCDRCMVGYWGFGDYGCRPCDCAGSCDPITGDCISSHTDIDWCHEVPD

SEQ ID NO: 499 - DNA, 1374 bp, Homo sapiens
  CDS (1)..(1374)
ctgagtggagtagctggagtgagttcccgctgtgaaaaagcctgcaaccctcggatgggaaatttggctttggggcgaaaactctgggcagacaccacctgcggtcagaatgctaccgaactgtactgcttctacagtgagaacaaggatctgacttgtcggcagcccaaatgtgacaagtgcaatgctgcctatcctcacctggctcacctgccatctgccatggcagactcatccttccggtttcctcgcacatggtggcagtctgcggaggatgtgcacagagaaaagatccagttagacctggaagctgaattctacttcactcacctaattgtgatgttcaagtcccccaggccggctgccatggtgctggaccgctcccaggactttgggaaaacatggaagccttataagtactttgcgactaactgctccgctacatttggcctggaagatgatgttgtcaagaagggcgctatttgtacttctaaatactccagtccttttccatgcactggaggagaggttattttcaaagctttgtcaccaccacacgatacagagaacccttacagtgccaaagttcaggagcagctgaagatcaccaaccttcgcgtgcagctgctgaaacgacagtcttgtccctgtcagagaaatgacctgaacgaagagcctcaacattttacacactatgcgatctatgatttcattgtcaagggcagctgcttctgcaatggccacgccgatcaatgcatacctgttcatggcttcagacctgtcaaggccccaggaacattccacatggtccatgggaagtgtatgtgtaagcacaacacagcaggcagccactgccagcactgtgccccgttatacaatgaccggccatgggaggcagctgatggcaaaacgggggctcccaacgagtgcagaacccgcaagtgtaatgggcatgctgatacctgtcacttcgacgttaatgtgtgggaggcatcagggaatcgtagtggtggtgtctgtgatgactgtcagcacaacacagaaggacagtattgccagaggtgcaagccaggcttctatcgtgacctgcggagacccttctcagctccagatgcttgcaaaccgtgttcctgccatccagtaggatcagctgtccttcctgccaactcagtgaccttctgcgaccccagcaatggtgactgcccttgcaagcctggggtggcagggcgacgttgtgacaggtgcatggtgggatactggggcttcggagactatggctgtcgaccatgtgactgtgcggggagctgtgaccctatcaccggagactgcatcagcagccacacagacatagactggtatcatgaagttcctgac

SEQ ID NO: 500 - protein, 458 aa, Homo sapiens
LSGVAGVSSRCEKACNPRMGNLALGRKLWADTTCGQNATELYCFYSENKDLTCRQPKCDKCNAAYPHLAHLPSAMADSSFRFPRTWWQSAEDVHREKIQLDLEAEFYFTHLIVMFKSPRPAAMVLDRSQDFGKTWKPYKYFATNCSATFGLEDDVVKKGAICTSKYSSPFPCTGGEVIFKALSPPHDTENPYSAKVQEQLKITNLRVQLLKRQSCPCQRNDLNEEPQHFTHYAIYDFIVKGSCFCNGHADQCIPVHGFRPVKAPGTFHMVHGKCMCKHNTAGSHCQHCAPLYNDRPWEAADGKTGAPNECRTRKCNGHADTCHFDVNVWEASGNRSGGVCDDCQHNTEGQYCQRCKPGFYRDLRRPFSAPDACKPCSCHPVGSAVLPANSVTFCDPSNGDCPCKPGVAGRRCDRCMVGYWGFGDYGCRPCDCAGSCDPITGDCISSHTDIDWYHEVPD

SEQ ID NO: 501 - DNA, 1374 bp, Homo sapiens
  CDS (1)..(1374)
ctgagtggagtagctggagtgagttcccgctgtgaaaaagcctgcaaccctcggatgggaaatttggctttggggcgaaaactctgggcagacaccacctgcggtcagaatgctaccgaactgtactgcttctacagtgagaacaaggatctgacttgtcggcagcccaaatgtgacaagtgcaatgctgcctatcctcacctggctcacctgccatctgccatggcagactcatccttccggtttcctcgcacatggtggcagtctgcggaggatgtgcacagagaaaagatccagttagacctggaagctgaattctacttcactcacctaattgtgatgttcaagtcccccaggccggctgccatggtgctggaccgctcccaggactttgggaaaacatggaagccttataagtactttgcgactaactgctccgctacatttggcctggaagatgatgttgtcaagaagggcgctatttgtacttctaaatactccagtccttttccatgcactggaggagaggttattttcaaagctttgtcaccaccacacgatacagagaacccttacagtgccaaagttcaggagcagctgaagatcaccaaccttcgcgtgcagctgctgaaacgacagtcttgtccctgtcagagaaatgacctgaacgaagagcctcaacattttacacactatgcgatctatgatttcattgtcaagggcagctgcttctgcaatggccacgccgatcaatgcatacctgttcatggcttcagacctgtcaaggccccaggaacattccacatggtccatgggaagtgtatgtgtaagcacaacacagcaggcagccactgccagcactgtgccccgttatacaatgaccggccatgggaggcagctgatggcaaaacgggggctcccaacgagtgcagaacctgcaagtgtaatgggcatgctgatacctgtcacttcgacgttaatgtgtgggaggcatcagggagtcgtagtggtggtgtctgtgatgactgtcagcacaacacagaaggacagtattgccagaggtgcaagccaggcttctatcgtgacctgcggagacccttctcagctccagatgcttgcaaaccgtgttcctgccatccagtaggatcagctgtccttcctgccaactcagtgaccttctgcgaccccagcaatggtgactgcccttgcaagcctggggtggcagggcgacgttgtgacaggtgcatggtgggatactggggcttcggagactatggctgtcgaccatgtgactgtgcggggagctgtgaccctatcaccggagactgcatcagcagccacacagacatagactggtatcatgaagttcctgac

SEQ ID NO: 502 - protein, 458 aa, Homo sapiens
LSGVAGVSSRCEKACNPRMGNLALGRKLWADTTCGQNATELYCFYSENKDLTCRQPKCDKCNAAYPHLAHLPSAMADSSFRFPRTWWQSAEDVHREKIQLDLEAEFYFTHLIVMFKSPRPAAMVLDRSQDFGKTWKPYKYFATNCSATFGLEDDVVKKGAICTSKYSSPFPCTGGEVIFKALSPPHDTENPYSAKVQEQLKITNLRVQLLKRQSCPCQRNDLNEEPQHFTHYAIYDFIVKGSCFCNGHADQCIPVHGFRPVKAPGTFHMVHGKCMCKHNTAGSHCQHCAPLYNDRPWEAADGKTGAPNECRTCKCNGHADTCHFDVNVWEASGSRSGGVCDDCQHNTEGQYCQRCKPGFYRDLRRPFSAPDACKPCSCHPVGSAVLPANSVTFCDPSNGDCPCKPGVAGRRCDRCMVGYWGFGDYGCRPCDCAGSCDPITGDCISSHTDIDWYHEVPD

SEQ ID NO: 503 - DNA, 1374 bp, Homo sapiens
  CDS (1)..(1374)
ctgagtggagtagctggagtgagttcccgctgtgaaaaagcctgcaaccctcggatgggaaatttggctttggggcgaaaactctgggcagacaccacctgcggtcagaatgctaccgaactgtactgcttctacagtgagaacaaggatctgacttgtcggcagcccaaatgtgacaagtgcaatgctgcctatcctcacctggctcacctgccatctgccatggcagactcatccttccggtttcctcgcacatggtggcagtctgcggaggatgtgcacagagaaaagatccagttagacctggaagctgaattctacttcactcacctaattgtgatgttcaagtcccccaggccggctgccatggtgctggaccgctcccaggactttgggaaaacatggaagccttataagtactttgcgactaactgctccgctacatttggcctggaagatgatgttgtcaagaagggcgctatttgtacttctaaatactccagtccttttccatgcactggaggagaggttattttcaaagctttgtcaccaccacacgatacagagaacccttacagtgccaaagttcaggagcagctgaagatcaccaaccttcgcgtgcagctgctgaaacgacagtcttgtccctgtcagagaaatgacctgaacgaagagcctcaacattttacacactatgcgatctatgatttcattgtcaagggcagctgcttctgcaatggccacgccgatcaatgcatacctgttcatggcttcagacctgtcaaggccccaggaacattccacatggtccatgggaagtgtatgtgtaagcacaacacagcaggcagccactgccagcactgtgccccgttatacaatgaccggccatgggaggcagctgatggcaaaacgggggctcccaacgagtgcagaacccgcaagtgtaatgggcatgctgatacctgtcacttcgacgttaatgtgtgggaggcatcagggagtcgtagtggtggtgtctgtgatgactgtcagcacaacacagaaggacagtattgccagaggtgcaagccaggcttctatcgtgacctgcggagacccttctcagctccagatgcttgcaaaccgtgttcctgccatccagtaggatcagctgtccttcctgccaactcagtgaccttctgcgaccccagcaatggtgactgcccttgcaagcctggggtggcagggcgacgttgtgacaggtgcatggtgggatactggggcttcggagactatggctgtcgaccatgtgactgtgcggggagctgtgaccctatcaccggagactgcatcagcagccacacagacatagactggtatcatgaagttcctgac

SEQ ID NO: 504 - protein, 458 aa, Homo sapiens
LSGVAGVSSRCEKACNPRMGNLALGRKLWADTTCGQNATELYCFYSENKDLTCRQPKCDKCNAAYPHLAHLPSAMADSSFRFPRTWWQSAEDVHREKIQLDLEAEFYFTHLIVMFKSPRPAAMVLDRSQDFGKTWKPYKYFATNCSATFGLEDDVVKKGAICTSKYSSPFPCTGGEVIFKALSPPHDTENPYSAKVQEQLKITNLRVQLLKRQSCPCQRNDLNEEPQHFTHYAIYDFIVKGSCFCNGHADQCIPVHGFRPVKAPGTFHMVHGKCMCKHNTAGSHCQHCAPLYNDRPWEAADGKTGAPNECRTRKCNGHADTCHFDVNVWEASGSRSGGVCDDCQHNTEGQYCQRCKPGFYRDLRRPFSAPDACKPCSCHPVGSAVLPANSVTFCDPSNGDCPCKPGVAGRRCDRCMVGYWGFGDYGCRPCDCAGSCDPITGDCISSHTDIDWYHEVPD

SEQ ID NO: 505 - DNA, 1368 bp, Homo sapiens
  CDS (1)..(1368)
aaagcctgcaaccctcggatgggaaatttggctttggggcgaaaactctgggcagacaccacctgcggtcagaatgctaccgaactgtactgcttctacagtgagaacacggatctgacttgtcggcagcccaaatgtgacaagtgcaatgctgcctatcctcacctggctcacctgccatctgccatggcagactcatccttccggtttcctcgcacatggtggcagtctgcggaggatgtgcacagagaaaagatccagttagacctggaagctgaattctacttcactcacctaattgtgatgttcaagtcccccaggccggctgccatggtgctggaccgctcccaggactttgggaaaacatggaagccttataagtactttgcgactaactgctccgctacatttggcctggaagatgatgttgtcaagaagggcgctatttgtactcctaaatactccagtccttttccatgcactggaggagaggttattttcaaagctttgtcaccaccatacgatacagagaacccttacagtgccaaagttcaggagcagctgaagatcaccaaccttcgcgtgcagctgctgaaacgacagtcttatccctgtcagagaaatgacctgaacgaagagcctcaacattttacacactatgcgatctatgatttcattgtcaagggcagctgcttctgcaatggccacgccgatcaatgcatacctgttcatggcttcagacctgtcaaggccccaggaacattccacatggtccatgggaagtgtatgtgtaagcacaacacagcaggcagccactgccagcactgtgccccgttatacaatgaccggccatgggaggcagctgatggcaaaacgggggctcccaacgagtgcagaacccgcaagtgtaatgggcatgctgatacctgtcacttcgacgttaatgtgtgggaggcatcagggagtcgtagtggtggtgtctgtgatgactgtcagcacaacacagaaggacagtattgccagaggtgcaagccaggcttctatcgtgacctgcggagacccttctcagctccagatgcttgcaaaccgtgttcctgccatccagtaggatcagctgtccttcctgccaactcagtgaccttctgcgaccccagcaatggtgactgcccttgcaagcctggggtggcagggcgacgttgtgacaggtgcatggtgggatactggggcttcggagactatggctgtcgaccatgtgactgtgcggggagctgtgaccctatcaccggagactgcatcagcagccacacagacatagactggtatcatgaagttcctgacggatccgagctcggtaccaagcttacgtag

SEQ ID NO: 506 - protein, 455 aa, Homo sapiens
KACNPRMGNLALGRKLWADTTCGQNATELYCFYSENTDLTCRQPKCDKCNAAYPHLAHLPSAMADSSFRFPRTWWQSAEDVHREKIQLDLEAEFYFTHLIVMFKSPRPAAMVLDRSQDFGKTWKPYKYFATNCSATFGLEDDVVKKGAICTPKYSSPFPCTGGEVIFKALSPPYDTENPYSAKVQEQLKITNLRVQLLKRQSYPCQRNDLNEEPQHFTHYAIYDFIVKGSCFCNGHADQCIPVHGFRPVKAPGTFHMVHGKCMCKHNTAGSHCQHCAPLYNDRPWEAADGKTGAPNECRTRKCNGHADTCHFDVNVWEASGSRSGGVCDDCQHNTEGQYCQRCKPGFYRDLRRPFSAPDACKPCSCHPVGSAVLPANSVTFCDPSNGDCPCKPGVAGRRCDRCMVGYWGFGDYGCRPCDCAGSCDPITGDCISSHTDIDWYHEVPDGSELGTKLT

SEQ ID NO: 507 - DNA, 1338 bp, Homo sapiens
  CDS (1)..(1338)
aaagcctgcaaccctcggatgggaaatttggctttggggcgaaaactctgggcagacaccacctgcggtcagaatgctaccgaactgtactgcttctacagtgagaacacggatctgacttgtcggcagcccaaatgtgacaagtgcaatgctgcctatcctcacctggctcacctgccatctgccatggcagactcatccttccggtttcctcgcacatggtggcagtctgcggaggatgtgcacagagaaaagatccagttagacctggaagctgaattctacttcactcacctaattgtgatgttcaagtcccccaggccggctgccatggtgctggaccgctcccaggactttgggaaaacatggaagccttataagtactttgcgactaactgctccgctacatttggcctggaagatgatgttgtcaagaagggcgctatttgtactcctaaatactccagtccttttccatgcactggaggagaggttattttcaaagctttgtcaccaccatacgatacagagaacccttacagtgccaaagttcaggagcagctgaagatcaccaaccttcgcgtgcagctgctgaaacgacagtcttatccctgtcagagaaatgacctgaacgaagagcctcaacattttacacactatgcgatctatgatttcattgtcaagggcagctgcttctgcaatggccacgccgatcaatgcatacctgttcatggcttcagacctgtcaaggccccaggaacattccacatggtccatgggaagtgtatgtgtaagcacaacacagcaggcagccactgccagcactgtgccccgttatacaatgaccggccatgggaggcagctgatggcaaaacgggggctcccaacgagtgcagagcccgcaagtgtaatgggcatgctgatacctgtcacttcgacgttaatgtgtgggaggcatcagggagtcgtagtggtggtgtctgtgatgactgtcagcacaacacagaaggacagtattgccagaggtgcaagccaggcttctatcgtgacctgcggagacccttctcagctccagatgcttgcaaaccgtgttcctgccatccagtaggatcagctgtccttcctgccaactcagtgaccttctgcgaccccagcaatggtgactgcccttgcaagcctggggtggcagggcgacgttgtgacaggtgcatggtgggatactggggcttcggagactatggctgtcgaccatgtgactgtgcggggagctgtgaccctatcaccggagactgcatcagcagccacacagacatagactggtatcatgaagttcctgac

SEQ ID NO: 508 - protein, 446 aa, Homo sapiens
KACNPRMGNLALGRKLWADTTCGQNATELYCFYSENTDLTCRQPKCDKCNAAYPHLAHLPSAMADSSFRFPRTWWQSAEDVHREKIQLDLEAEFYFTHLIVMFKSPRPAAMVLDRSQDFGKTWKPYKYFATNCSATFGLEDDVVKKGAICTPKYSSPFPCTGGEVIFKALSPPYDTENPYSAKVQEQLKITNLRVQLLKRQSYPCQRNDLNEEPQHFTHYAIYDFIVKGSCFCNGHADQCIPVHGFRPVKAPGTFHMVHGKCMCKHNTAGSHCQHCAPLYNDRPWEAADGKTGAPNECRARKCNGHADTCHFDVNVWEASGSRSGGVCDDCQHNTEGQYCQRCKPGFYRDLRRPFSAPDACKPCSCHPVGSAVLPANSVTFCDPSNGDCPCKPGVAGRRCDRCMVGYWGFGDYGCRPCDCAGSCDPITGDCISSHTDIDWYHEVPD

SEQ ID NO: 509 - DNA, 1338 bp, Homo sapiens
  CDS (1)..(1338)
aaagcctgcaaccctcggatgggaaatttggctttggggcgaaaactctgggcagacaccacctgcggtcagaatgctaccgaactgtactgcttctacagtgagaacacggatctgacttgtcggcagcccaaatgtgacaagtgcaatgctgcctatcctcacctggctcacctgccatctgccatggcagactcatccttccggtttcctcgcacatggtggcagtctgcggaggatgtgcacagagaaaagatccagttagacctggaagctgaattctacttcactcacctaattgtgatgttcaagtcccccaggccggctgccatggtgctggaccgctcccaggactttgggaaaacatggaagccttataagtactttgcgactaactgctccgctacatttggcctggaagatgatgttgtcaagaagggcgctatttgtactcctaaatactccagtccttttccatgcactggaggagaggttattttcaaagctttgtcaccaccatacgatacagagaacccttacagtgccaaagttcaggagcagctgaagatcaccaaccttcgcgtgcagctgctgaaacgacagtcttatccctgtcagagaaatgacctgaacgaagagcctcaacattttacacactatgcgatctatgatttcattgtcaagggcagctgcttctgcaatggccacgccgatcaatgcatacctgttcatggcttcagacctgtcaaggccccaggaacattccacatggtccatgggaagtgtatgtgtaagcacaacacagcaggcagccactgccagcactgtgccccgttatacaatgaccggccatgggaggcagctgatggcaaaacgggggctcccaacgagtgcagaacctgcaagtgtaatgggcatgctgatacctgtcacttcgacgttaatgtgtgggaggcatcagggagtcgtagtggtggtgtctgtgatgactgtcagcacaacacagaaggacagtattgccagaggtgcaagccaggcttctatcgtgacctgcggagacccttctcagctccagatgcttgcaaaccgtgttcctgccatccagtaggatcagctgtccttcctgccaactcagtgaccttctgcgaccccagcaatggtgactgcccttgcaagcctggggtggcagggcgacgttgtgacaggtgcatggtgggatactggggcttcggagactatggctgtcgaccatgtgactgtgcggggagctgtgaccctatcaccggagactgcatcagcagccacacagacatagactggtatcatgaagttcctgac

SEQ ID NO: 510 - protein, 446 aa, Homo sapiens
KACNPRMGNLALGRKLWADTTCGQNATELYCFYSENTDLTCRQPKCDKCNAAYPHLAHLPSAMADSSFRFPRTWWQSAEDVHREKIQLDLEAEFYFTHLIVMFKSPRPAAMVLDRSQDFGKTWKPYKYFATNCSATFGLEDDVVKKGAICTPKYSSPFPCTGGEVIFKALSPPYDTENPYSAKVQEQLKITNLRVQLLKRQSYPCQRNDLNEEPQHFTHYAIYDFIVKGSCFCNGHADQCIPVHGFRPVKAPGTFHMVHGKCMCKHNTAGSHCQHCAPLYNDRPWEAADGKTGAPNECRTCKCNGHADTCHFDVNVWEASGSRSGGVCDDCQHNTEGQYCQRCKPGFYRDLRRPFSAPDACKPCSCHPVGSAVLPANSVTFCDPSNGDCPCKPGVAGRRCDRCMVGYWGFGDYGCRPCDCAGSCDPITGDCISSHTDIDWYHEVPD

SEQ ID NO: 511 - DNA, 1338 bp, Homo sapiens
  CDS (1)..(1338)
aaagcctgcaaccctcggatgggaaatttggctttggggcgaaaactctgggcagacaccacctgcggtcagaatgctaccgaactgtactgcttctacagtgagaacacggatctgacttgtcggcagcccaaatgtgacaagtgcaatgctgcctatcctcacctggctcacctgccatctgccatggcagactcatccttccggtttcctcgcacatggtggcagtctgcggaggatgtgcacagagaaaagatccagttagacctggaagctgaattctacttcactcacctaattgtgatgttcaagtcccccaggccggctgccatggtgctggaccgctcccaggactttgggaaaacatggaagccttataagtactttgcgactaactgctccgctacatttggcctggaagatgatgttgtcaagaagggcgctatttgtactcctaaatactccagtccttttccatgcactggaggagaggttattttcaaagctttgtcaccaccatacgatacagagaacccttacagtgccaaagttcaggagcagctgaagatcaccaaccttcgcgtgcagctgctgaaacgacagtcttatccctgtcagagaaatgacctgaacgaagagcctcaacattttacacactatgcgatctatgatttcattgtcaagggcagctgcttctgcaatggccacgccgatcaatgcatacctgttcatggcttcagacctgtcaaggccccaggaacattccacatggtccatgggaagtgtatgtgtaagcacaacacagcaggcagccactgccagcactgtgccccgttatacaatgaccggccatgggaggcagctgatggcaaaacgggggctcccaacgagtgcagaacccgcaagtgtaatgggcatgctgatacctgtcacttcgacgttaatgtgtgggaggcatcagggaatcgtagtggtggtgtctgtgatgactgtcagcacaacacagaaggacagtattgccagaggtgcaagccaggcttctatcgtgacctgcggagacccttctcagctccagatgcttgcaaaccgtgttcctgccatccagtaggatcagctgtccttcctgccaactcagtgaccttctgcgaccccagcaatggtgactgcccttgcaagcctggggtggcagggcgacgttgtgacaggtgcatggtgggatactggggcttcggagactatggctgtcgaccatgtgactgtgcggggagctgtgaccctatcaccggagactgcatcagcagccacacagacatagactggtatcatgaagttcctgac

SEQ ID NO: 512 - protein, 446 aa, Homo sapiens
KACNPRMGNLALGRKLWADTTCGQNATELYCFYSENTDLTCRQPKCDKCNAAYPHLAHLPSAMADSSFRFPRTWWQSAEDVHREKIQLDLEAEFYFTHLIVMFKSPRPAAMVLDRSQDFGKTWKPYKYFATNCSATFGLEDDVVKKGAICTPKYSSPFPCTGGEVIFKALSPPYDTENPYSAKVQEQLKITNLRVQLLKRQSYPCQRNDLNEEPQHFTHYAIYDFIVKGSCFCNGHADQCIPVHGFRPVKAPGTFHMVHGKCMCKHNTAGSHCQHCAPLYNDRPWEAADGKTGAPNECRTRKCNGHADTCHFDVNVWEASGNRSGGVCDDCQHNTEGQYCQRCKPGFYRDLRRPFSAPDACKPCSCHPVGSAVLPANSVTFCDPSNGDCPCKPGVAGRRCDRCMVGYWGFGDYGCRPCDCAGSCDPITGDCISSHTDIDWYHEVPD

SEQ ID NO: 513 - DNA, 1338 bp, Homo sapiens
  CDS (1)..(1338)
aaagcctgcaaccctcggatgggaaatttggctttggggcgaaaactctgggcagacaccacctgcggtcagaatgctaccgaactgtactgcttctacagtgagaacacggatctgacttgtcggcagcccaaatgtgacaagtgcaatgctgcctatcctcacctggctcacctgccatctgccatggcagactcatccttccggtttcctcgcacatggtggcagtctgcggaggatgtgcacagagaaaagatccagttagacctggaagctgaattctacttcactcacctaattgtgatgttcaagtcccccaggccggctgccatggtgctggaccgctcccaggactttgggaaaacatggaagccttataagtactttgcgactaactgctccgctacatttggcctggaagatgatgttgtcaagaagggcgctatttgtactcctaaatactccagtccttttccatgcactggaggagaggttattttcaaagctttgtcaccaccatacgatacagagaacccttacagtgccaaagttcaggagcagctgaagatcaccaaccttcgcgtgcagctgctgaaacgacagtcttatccctgtcagagaaatgacctgaacgaagagcctcaacattttacacactatgcgatctatgatttcattgtcaagggcagctgcttctgcaatggccacgccgatcaatgcatacctgttcatggcttcagacctgtcaaggccccaggaacattccacatggtccatgggaagtgtatgtgtaagcacaacacagcaggcagccactgccagcactgtgccccgttatacaatgaccggccatgggaggcagctgatggcaaaacgggggctcccaacgagtgcagaacccgcaagtgtaatgggcatgctgatacctgtcacttcgacgttaatgtgtgggaggcatcagggagtcgtagtggtggtgtctgtgatgactgtcagcacaacacagaaggacagtattgccagaggtgcaagccaggcttctatcgtgacctgcggagacccttctcagctccagatgcttgcaaaccgtgttcctgccatccagtaggatcagctgtccttcctgccaactcagtgaccttctgcgaccccagcaatggtgactgcccttgcaagcctggggtggcagggcgacgttgtgacaggtgcatggtgggatactggggcttcggagactatggctgtcgaccatgtgactgtgcggggagctgtgaccctatcaccggagactgcatcagcagccacacagacatagactggtgtcatgaagttcctgac

SEQ ID NO: 514 - protein, 446 aa, Homo sapiens
KACNPRMGNLALGRKLWADTTCGQNATELYCFYSENTDLTCRQPKCDKCNAAYPHLAHLPSAMADSSFRFPRTWWQSAEDVHREKIQLDLEAEFYFTHLIVMFKSPRPAAMVLDRSQDFGKTWKPYKYFATNCSATFGLEDDVVKKGAICTPKYSSPFPCTGGEVIFKALSPPYDTENPYSAKVQEQLKITNLRVQLLKRQSYPCQRNDLNEEPQHFTHYAIYDFIVKGSCFCNGHADQCIPVHGFRPVKAPGTFHMVHGKCMCKHNTAGSHCQHCAPLYNDRPWEAADGKTGAPNECRTRKCNGHADTCHFDVNVWEASGSRSGGVCDDCQHNTEGQYCQRCKPGFYRDLRRPFSAPDACKPCSCHPVGSAVLPANSVTFCDPSNGDCPCKPGVAGRRCDRCMVGYWGFGDYGCRPCDCAGSCDPITGDCISSHTDIDWCHEVPD

SEQ ID NO: 515 - DNA, 1338 bp, Homo sapiens
  CDS (1)..(1338)
aaagcctgcaaccctcggatgggaaatttggctttggggcgaaaactctgggcagacaccacctgcggtcagaatgctaccgaactgtactgcttctacagtgagaacacggatctgacttgtcggcagcccaaatgtgacaagtgcaatgctgcctatcctcacctggctcacctgccatctgccatggcagactcatccttccggtttcctcgcacatggtggcagtctgcggaggatgtgcacagagaaaagatccagttagacctggaagctgaattctacttcactcacctaattgtgatgttcaagtcccccaggccggctgccatggtgctggaccgctcccaggactttgggaaaacatggaagccttataagtactttgcgactaactgctccgctacatttggcctggaagatgatgttgtcaagaagggcgctatttgtactcctaaatactccagtccttttccatgcactggaggagaggttattttcaaagctttgtcaccaccatacgatacagagaacccttacagtgccaaagttcaggagcagctgaagatcaccaaccttcgcgtgcagctgctgaaacgacagtcttatccctgtcagagaaatgacctgaacgaagagcctcaacattttacacactatgcgatctatgatttcattgtcaagggcagctgcttctgcaatggccacgccgatcaatgcatacctgttcatggcttcagacctgtcaaggccccaggaacattccacatggtccatgggaagtgtatgtgtaagcacaacacagcaggcagccactgccagcactgtgccccgttatacaatgaccggccatgggaggcagctgatggcaaaacgggggctcccaacgagtgcagagcctgcaagtgtaatgggcatgctgatacctgtcacttcgacgttaatgtgtgggaggcatcagggagtcgtagtggtggtgtctgtgatgactgtcagcacaacacagaaggacagtattgccagaggtgcaagccaggcttctatcgtgacctgcggagacccttctcagctccagatgcttgcaaaccgtgttcctgccatccagtaggatcagctgtccttcctgccaactcagtgaccttctgcgaccccagcaatggtgactgcccttgcaagcctggggtggcagggcgacgttgtgacaggtgcatggtgggatactggggcttcggagactatggctgtcgaccatgtgactgtgcggggagctgtgaccctatcaccggagactgcatcagcagccacacagacatagactggtatcatgaagttcctgac

SEQ ID NO: 516 - protein, 446 aa, Homo sapiens
KACNPRMGNLALGRKLWADTTCGQNATELYCFYSENTDLTCRQPKCDKCNAAYPHLAHLPSAMADSSFRFPRTWWQSAEDVHREKIQLDLEAEFYFTHLIVMFKSPRPAAMVLDRSQDFGKTWKPYKYFATNCSATFGLEDDVVKKGAICTPKYSSPFPCTGGEVIFKALSPPYDTENPYSAKVQEQLKITNLRVQLLKRQSYPCQRNDLNEEPQHFTHYAIYDFIVKGSCFCNGHADQCIPVHGFRPVKAPGTFHMVHGKCMCKHNTAGSHCQHCAPLYNDRPWEAADGKTGAPNECRACKCNGHADTCHFDVNVWEASGSRSGGVCDDCQHNTEGQYCQRCKPGFYRDLRRPFSAPDACKPCSCHPVGSAVLPANSVTFCDPSNGDCPCKPGVAGRRCDRCMVGYWGFGDYGCRPCDCAGSCDPITGDCISSHTDIDWYHEVPD

SEQ ID NO: 517 - DNA, 1338 bp, Homo sapiens
  CDS (1)..(1338)
aaagcctgcaaccctcggatgggaaatttggctttggggcgaaaactctgggcagacaccacctgcggtcagaatgctaccgaactgtactgcttctacagtgagaacacggatctgacttgtcggcagcccaaatgtgacaagtgcaatgctgcctatcctcacctggctcacctgccatctgccatggcagactcatccttccggtttcctcgcacatggtggcagtctgcggaggatgtgcacagagaaaagatccagttagacctggaagctgaattctacttcactcacctaattgtgatgttcaagtcccccaggccggctgccatggtgctggaccgctcccaggactttgggaaaacatggaagccttataagtactttgcgactaactgctccgctacatttggcctggaagatgatgttgtcaagaagggcgctatttgtactcctaaatactccagtccttttccatgcactggaggagaggttattttcaaagctttgtcaccaccatacgatacagagaacccttacagtgccaaagttcaggagcagctgaagatcaccaaccttcgcgtgcagctgctgaaacgacagtcttatccctgtcagagaaatgacctgaacgaagagcctcaacattttacacactatgcgatctatgatttcattgtcaagggcagctgcttctgcaatggccacgccgatcaatgcatacctgttcatggcttcagacctgtcaaggccccaggaacattccacatggtccatgggaagtgtatgtgtaagcacaacacagcaggcagccactgccagcactgtgccccgttatacaatgaccggccatgggaggcagctgatggcaaaacgggggctcccaacgagtgcagagcccgcaagtgtaatgggcatgctgatacctgtcacttcgacgttaatgtgtgggaggcatcagggaatcgtagtggtggtgtctgtgatgactgtcagcacaacacagaaggacagtattgccagaggtgcaagccaggcttctatcgtgacctgcggagacccttctcagctccagatgcttgcaaaccgtgttcctgccatccagtaggatcagctgtccttcctgccaactcagtgaccttctgcgaccccagcaatggtgactgcccttgcaagcctggggtggcagggcgacgttgtgacaggtgcatggtgggatactggggcttcggagactatggctgtcgaccatgtgactgtgcggggagctgtgaccctatcaccggagactgcatcagcagccacacagacatagactggtatcatgaagttcctgac

SEQ ID NO: 518 - protein, 446 aa, Homo sapiens
KACNPRMGNLALGRKLWADTTCGQNATELYCFYSENTDLTCRQPKCDKCNAAYPHLAHLPSAMADSSFRFPRTWWQSAEDVHREKIQLDLEAEFYFTHLIVMFKSPRPAAMVLDRSQDFGKTWKPYKYFATNCSATFGLEDDVVKKGAICTPKYSSPFPCTGGEVIFKALSPPYDTENPYSAKVQEQLKITNLRVQLLKRQSYPCQRNDLNEEPQHFTHYAIYDFIVKGSCFCNGHADQCIPVHGFRPVKAPGTFHMVHGKCMCKHNTAGSHCQHCAPLYNDRPWEAADGKTGAPNECRARKCNGHADTCHFDVNVWEASGNRSGGVCDDCQHNTEGQYCQRCKPGFYRDLRRPFSAPDACKPCSCHPVGSAVLPANSVTFCDPSNGDCPCKPGVAGRRCDRCMVGYWGFGDYGCRPCDCAGSCDPITGDCISSHTDIDWYHEVPD

SEQ ID NO: 519 - DNA, 1338 bp, Homo sapiens
  CDS (1)..(1338)
aaagcctgcaaccctcggatgggaaatttggctttggggcgaaaactctgggcagacaccacctgcggtcagaatgctaccgaactgtactgcttctacagtgagaacacggatctgacttgtcggcagcccaaatgtgacaagtgcaatgctgcctatcctcacctggctcacctgccatctgccatggcagactcatccttccggtttcctcgcacatggtggcagtctgcggaggatgtgcacagagaaaagatccagttagacctggaagctgaattctacttcactcacctaattgtgatgttcaagtcccccaggccggctgccatggtgctggaccgctcccaggactttgggaaaacatggaagccttataagtactttgcgactaactgctccgctacatttggcctggaagatgatgttgtcaagaagggcgctatttgtactcctaaatactccagtccttttccatgcactggaggagaggttattttcaaagctttgtcaccaccatacgatacagagaacccttacagtgccaaagttcaggagcagctgaagatcaccaaccttcgcgtgcagctgctgaaacgacagtcttatccctgtcagagaaatgacctgaacgaagagcctcaacattttacacactatgcgatctatgatttcattgtcaagggcagctgcttctgcaatggccacgccgatcaatgcatacctgttcatggcttcagacctgtcaaggccccaggaacattccacatggtccatgggaagtgtatgtgtaagcacaacacagcaggcagccactgccagcactgtgccccgttatacaatgaccggccatgggaggcagctgatggcaaaacgggggctcccaacgagtgcagagcccgcaagtgtaatgggcatgctgatacctgtcacttcgacgttaatgtgtgggaggcatcagggagtcgtagtggtggtgtctgtgatgactgtcagcacaacacagaaggacagtattgccagaggtgcaagccaggcttctatcgtgacctgcggagacccttctcagctccagatgcttgcaaaccgtgttcctgccatccagtaggatcagctgtccttcctgccaactcagtgaccttctgcgaccccagcaatggtgactgcccttgcaagcctggggtggcagggcgacgttgtgacaggtgcatggtgggatactggggcttcggagactatggctgtcgaccatgtgactgtgcggggagctgtgaccctatcaccggagactgcatcagcagccacacagacatagactggtgtcatgaagttcctgac

SEQ ID NO: 520 - protein, 446 aa, Homo sapiens
KACNPRMGNLALGRKLWADTTCGQNATELYCFYSENTDLTCRQPKCDKCNAAYPHLAHLPSAMADSSFRFPRTWWQSAEDVHREKIQLDLEAEFYFTHLIVMFKSPRPAAMVLDRSQDFGKTWKPYKYFATNCSATFGLEDDVVKKGAICTPKYSSPFPCTGGEVIFKALSPPYDTENPYSAKVQEQLKITNLRVQLLKRQSYPCQRNDLNEEPQHFTHYAIYDFIVKGSCFCNGHADQCIPVHGFRPVKAPGTFHMVHGKCMCKHNTAGSHCQHCAPLYNDRPWEAADGKTGAPNECRARKCNGHADTCHFDVNVWEASGSRSGGVCDDCQHNTEGQYCQRCKPGFYRDLRRPFSAPDACKPCSCHPVGSAVLPANSVTFCDPSNGDCPCKPGVAGRRCDRCMVGYWGFGDYGCRPCDCAGSCDPITGDCISSHTDIDWCHEVPD

SEQ ID NO: 521 - DNA, 1338 bp, Homo sapiens
  CDS (1)..(1338)
aaagcctgcaaccctcggatgggaaatttggctttggggcgaaaactctgggcagacaccacctgcggtcagaatgctaccgaactgtactgcttctacagtgagaacacggatctgacttgtcggcagcccaaatgtgacaagtgcaatgctgcctatcctcacctggctcacctgccatctgccatggcagactcatccttccggtttcctcgcacatggtggcagtctgcggaggatgtgcacagagaaaagatccagttagacctggaagctgaattctacttcactcacctaattgtgatgttcaagtcccccaggccggctgccatggtgctggaccgctcccaggactttgggaaaacatggaagccttataagtactttgcgactaactgctccgctacatttggcctggaagatgatgttgtcaagaagggcgctatttgtactcctaaatactccagtccttttccatgcactggaggagaggttattttcaaagctttgtcaccaccatacgatacagagaacccttacagtgccaaagttcaggagcagctgaagatcaccaaccttcgcgtgcagctgctgaaacgacagtcttatccctgtcagagaaatgacctgaacgaagagcctcaacattttacacactatgcgatctatgatttcattgtcaagggcagctgcttctgcaatggccacgccgatcaatgcatacctgttcatggcttcagacctgtcaaggccccaggaacattccacatggtccatgggaagtgtatgtgtaagcacaacacagcaggcagccactgccagcactgtgccccgttatacaatgaccggccatgggaggcagctgatggcaaaacgggggctcccaacgagtgcagaacctgcaagtgtaatgggcatgctgatacctgtcacttcgacgttaatgtgtgggaggcatcagggaatcgtagtggtggtgtctgtgatgactgtcagcacaacacagaaggacagtattgccagaggtgcaagccaggcttctatcgtgacctgcggagacccttctcagctccagatgcttgcaaaccgtgttcctgccatccagtaggatcagctgtccttcctgccaactcagtgaccttctgcgaccccagcaatggtgactgcccttgcaagcctggggtggcagggcgacgttgtgacaggtgcatggtgggatactggggcttcggagactatggctgtcgaccatgtgactgtgcggggagctgtgaccctatcaccggagactgcatcagcagccacacagacatagactggtatcatgaagttcctgac

SEQ ID NO: 522 - protein, 446 aa, Homo sapiens
KACNPRMGNLALGRKLWADTTCGQNATELYCFYSENTDLTCRQPKCDKCNAAYPHLAHLPSAMADSSFRFPRTWWQSAEDVHREKIQLDLEAEFYFTHLIVMFKSPRPAAMVLDRSQDFGKTWKPYKYFATNCSATFGLEDDVVKKGAICTPKYSSPFPCTGGEVIFKALSPPYDTENPYSAKVQEQLKITNLRVQLLKRQSYPCQRNDLNEEPQHFTHYAIYDFIVKGSCFCNGHADQCIPVHGFRPVKAPGTFHMVHGKCMCKHNTAGSHCQHCAPLYNDRPWEAADGKTGAPNECRTCKCNGHADTCHFDVNVWEASGNRSGGVCDDCQHNTEGQYCQRCKPGFYRDLRRPFSAPDACKPCSCHPVGSAVLPANSVTFCDPSNGDCPCKPGVAGRRCDRCMVGYWGFGDYGCRPCDCAGSCDPITGDCISSHTDIDWYHEVPD

SEQ ID NO: 523 - DNA, 1338 bp, Homo sapiens
  CDS (1)..(1338)
aaagcctgcaaccctcggatgggaaatttggctttggggcgaaaactctgggcagacaccacctgcggtcagaatgctaccgaactgtactgcttctacagtgagaacacggatctgacttgtcggcagcccaaatgtgacaagtgcaatgctgcctatcctcacctggctcacctgccatctgccatggcagactcatccttccggtttcctcgcacatggtggcagtctgcggaggatgtgcacagagaaaagatccagttagacctggaagctgaattctacttcactcacctaattgtgatgttcaagtcccccaggccggctgccatggtgctggaccgctcccaggactttgggaaaacatggaagccttataagtactttgcgactaactgctccgctacatttggcctggaagatgatgttgtcaagaagggcgctatttgtactcctaaatactccagtccttttccatgcactggaggagaggttattttcaaagctttgtcaccaccatacgatacagagaacccttacagtgccaaagttcaggagcagctgaagatcaccaaccttcgcgtgcagctgctgaaacgacagtcttatccctgtcagagaaatgacctgaacgaagagcctcaacattttacacactatgcgatctatgatttcattgtcaagggcagctgcttctgcaatggccacgccgatcaatgcatacctgttcatggcttcagacctgtcaaggccccaggaacattccacatggtccatgggaagtgtatgtgtaagcacaacacagcaggcagccactgccagcactgtgccccgttatacaatgaccggccatgggaggcagctgatggcaaaacgggggctcccaacgagtgcagaacctgcaagtgtaatgggcatgctgatacctgtcacttcgacgttaatgtgtgggaggcatcagggagtcgtagtggtggtgtctgtgatgactgtcagcacaacacagaaggacagtattgccagaggtgcaagccaggcttctatcgtgacctgcggagacccttctcagctccagatgcttgcaaaccgtgttcctgccatccagtaggatcagctgtccttcctgccaactcagtgaccttctgcgaccccagcaatggtgactgcccttgcaagcctggggtggcagggcgacgttgtgacaggtgcatggtgggatactggggcttcggagactatggctgtcgaccatgtgactgtgcggggagctgtgaccctatcaccggagactgcatcagcagccacacagacatagactggtgtcatgaagttcctgac

SEQ ID NO: 524 - protein, 446 aa, Homo sapiens
KACNPRMGNLALGRKLWADTTCGQNATELYCFYSENTDLTCRQPKCDKCNAAYPHLAHLPSAMADSSFRFPRTWWQSAEDVHREKIQLDLEAEFYFTHLIVMFKSPRPAAMVLDRSQDFGKTWKPYKYFATNCSATFGLEDDVVKKGAICTPKYSSPFPCTGGEVIFKALSPPYDTENPYSAKVQEQLKITNLRVQLLKRQSYPCQRNDLNEEPQHFTHYAIYDFIVKGSCFCNGHADQCIPVHGFRPVKAPGTFHMVHGKCMCKHNTAGSHCQHCAPLYNDRPWEAADGKTGAPNECRTCKCNGHADTCHFDVNVWEASGSRSGGVCDDCQHNTEGQYCQRCKPGFYRDLRRPFSAPDACKPCSCHPVGSAVLPANSVTFCDPSNGDCPCKPGVAGRRCDRCMVGYWGFGDYGCRPCDCAGSCDPITGDCISSHTDIDWCHEVPD

SEQ ID NO: 525 - DNA, 1338 bp, Homo sapiens
  CDS (1)..(1338)
aaagcctgcaaccctcggatgggaaatttggctttggggcgaaaactctgggcagacaccacctgcggtcagaatgctaccgaactgtactgcttctacagtgagaacacggatctgacttgtcggcagcccaaatgtgacaagtgcaatgctgcctatcctcacctggctcacctgccatctgccatggcagactcatccttccggtttcctcgcacatggtggcagtctgcggaggatgtgcacagagaaaagatccagttagacctggaagctgaattctacttcactcacctaattgtgatgttcaagtcccccaggccggctgccatggtgctggaccgctcccaggactttgggaaaacatggaagccttataagtactttgcgactaactgctccgctacatttggcctggaagatgatgttgtcaagaagggcgctatttgtactcctaaatactccagtccttttccatgcactggaggagaggttattttcaaagctttgtcaccaccatacgatacagagaacccttacagtgccaaagttcaggagcagctgaagatcaccaaccttcgcgtgcagctgctgaaacgacagtcttatccctgtcagagaaatgacctgaacgaagagcctcaacattttacacactatgcgatctatgatttcattgtcaagggcagctgcttctgcaatggccacgccgatcaatgcatacctgttcatggcttcagacctgtcaaggccccaggaacattccacatggtccatgggaagtgtatgtgtaagcacaacacagcaggcagccactgccagcactgtgccccgttatacaatgaccggccatgggaggcagctgatggcaaaacgggggctcccaacgagtgcagaacccgcaagtgtaatgggcatgctgatacctgtcacttcgacgttaatgtgtgggaggcatcagggaatcgtagtggtggtgtctgtgatgactgtcagcacaacacagaaggacagtattgccagaggtgcaagccaggcttctatcgtgacctgcggagacccttctcagctccagatgcttgcaaaccgtgttcctgccatccagtaggatcagctgtccttcctgccaactcagtgaccttctgcgaccccagcaatggtgactgcccttgcaagcctggggtggcagggcgacgttgtgacaggtgcatggtgggatactggggcttcggagactatggctgtcgaccatgtgactgtgcggggagctgtgaccctatcaccggagactgcatcagcagccacacagacatagactggtgtcatgaagttcctgac

SEQ ID NO: 526 - protein, 446 aa, Homo sapiens
KACNPRMGNLALGRKLWADTTCGQNATELYCFYSENTDLTCRQPKCDKCNAAYPHLAHLPSAMADSSFRFPRTWWQSAEDVHREKIQLDLEAEFYFTHLIVMFKSPRPAAMVLDRSQDFGKTWKPYKYFATNCSATFGLEDDVVKKGAICTPKYSSPFPCTGGEVIFKALSPPYDTENPYSAKVQEQLKITNLRVQLLKRQSYPCQRNDLNEEPQHFTHYAIYDFIVKGSCFCNGHADQCIPVHGFRPVKAPGTFHMVHGKCMCKHNTAGSHCQHCAPLYNDRPWEAADGKTGAPNECRTRKCNGHADTCHFDVNVWEASGNRSGGVCDDCQHNTEGQYCQRCKPGFYRDLRRPFSAPDACKPCSCHPVGSAVLPANSVTFCDPSNGDCPCKPGVAGRRCDRCMVGYWGFGDYGCRPCDCAGSCDPITGDCISSHTDIDWCHEVPD

SEQ ID NO: 527 - DNA, 1338 bp, Homo sapiens
  CDS (1)..(1338)
aaagcctgcaaccctcggatgggaaatttggctttggggcgaaaactctgggcagacaccacctgcggtcagaatgctaccgaactgtactgcttctacagtgagaacacggatctgacttgtcggcagcccaaatgtgacaagtgcaatgctgcctatcctcacctggctcacctgccatctgccatggcagactcatccttccggtttcctcgcacatggtggcagtctgcggaggatgtgcacagagaaaagatccagttagacctggaagctgaattctacttcactcacctaattgtgatgttcaagtcccccaggccggctgccatggtgctggaccgctcccaggactttgggaaaacatggaagccttataagtactttgcgactaactgctccgctacatttggcctggaagatgatgttgtcaagaagggcgctatttgtactcctaaatactccagtccttttccatgcactggaggagaggttattttcaaagctttgtcaccaccatacgatacagagaacccttacagtgccaaagttcaggagcagctgaagatcaccaaccttcgcgtgcagctgctgaaacgacagtcttatccctgtcagagaaatgacctgaacgaagagcctcaacattttacacactatgcgatctatgatttcattgtcaagggcagctgcttctgcaatggccacgccgatcaatgcatacctgttcatggcttcagacctgtcaaggccccaggaacattccacatggtccatgggaagtgtatgtgtaagcacaacacagcaggcagccactgccagcactgtgccccgttatacaatgaccggccatgggaggcagctgatggcaaaacgggggctcccaacgagtgcagagcctgcaagtgtaatgggcatgctgatacctgtcacttcgacgttaatgtgtgggaggcatcagggaatcgtagtggtggtgtctgtgatgactgtcagcacaacacagaaggacagtattgccagaggtgcaagccaggcttctatcgtgacctgcggagacccttctcagctccagatgcttgcaaaccgtgttcctgccatccagtaggatcagctgtccttcctgccaactcagtgaccttctgcgaccccagcaatggtgactgcccttgcaagcctggggtggcagggcgacgttgtgacaggtgcatggtgggatactggggcttcggagactatggctgtcgaccatgtgactgtgcggggagctgtgaccctatcaccggagactgcatcagcagccacacagacatagactggtatcatgaagttcctgac

SEQ ID NO: 528 - protein, 446 aa, Homo sapiens
KACNPRMGNLALGRKLWADTTCGQNATELYCFYSENTDLTCRQPKCDKCNAAYPHLAHLPSAMADSSFRFPRTWWQSAEDVHREKIQLDLEAEFYFTHLIVMFKSPRPAAMVLDRSQDFGKTWKPYKYFATNCSATFGLEDDVVKKGAICTPKYSSPFPCTGGEVIFKALSPPYDTENPYSAKVQEQLKITNLRVQLLKRQSYPCQRNDLNEEPQHFTHYAIYDFIVKGSCFCNGHADQCIPVHGFRPVKAPGTFHMVHGKCMCKHNTAGSHCQHCAPLYNDRPWEAADGKTGAPNECRACKCNGHADTCHFDVNVWEASGNRSGGVCDDCQHNTEGQYCQRCKPGFYRDLRRPFSAPDACKPCSCHPVGSAVLPANSVTFCDPSNGDCPCKPGVAGRRCDRCMVGYWGFGDYGCRPCDCAGSCDPITGDCISSHTDIDWYHEVPD

SEQ ID NO: 529 - DNA, 1338 bp, Homo sapiens
  CDS (1)..(1338)
aaagcctgcaaccctcggatgggaaatttggctttggggcgaaaactctgggcagacaccacctgcggtcagaatgctaccgaactgtactgcttctacagtgagaacacggatctgacttgtcggcagcccaaatgtgacaagtgcaatgctgcctatcctcacctggctcacctgccatctgccatggcagactcatccttccggtttcctcgcacatggtggcagtctgcggaggatgtgcacagagaaaagatccagttagacctggaagctgaattctacttcactcacctaattgtgatgttcaagtcccccaggccggctgccatggtgctggaccgctcccaggactttgggaaaacatggaagccttataagtactttgcgactaactgctccgctacatttggcctggaagatgatgttgtcaagaagggcgctatttgtactcctaaatactccagtccttttccatgcactggaggagaggttattttcaaagctttgtcaccaccatacgatacagagaacccttacagtgccaaagttcaggagcagctgaagatcaccaaccttcgcgtgcagctgctgaaacgacagtcttatccctgtcagagaaatgacctgaacgaagagcctcaacattttacacactatgcgatctatgatttcattgtcaagggcagctgcttctgcaatggccacgccgatcaatgcatacctgttcatggcttcagacctgtcaaggccccaggaacattccacatggtccatgggaagtgtatgtgtaagcacaacacagcaggcagccactgccagcactgtgccccgttatacaatgaccggccatgggaggcagctgatggcaaaacgggggctcccaacgagtgcagagcctgcaagtgtaatgggcatgctgatacctgtcacttcgacgttaatgtgtgggaggcatcagggagtcgtagtggtggtgtctgtgatgactgtcagcacaacacagaaggacagtattgccagaggtgcaagccaggcttctatcgtgacctgcggagacccttctcagctccagatgcttgcaaaccgtgttcctgccatccagtaggatcagctgtccttcctgccaactcagtgaccttctgcgaccccagcaatggtgactgcccttgcaagcctggggtggcagggcgacgttgtgacaggtgcatggtgggatactggggcttcggagactatggctgtcgaccatgtgactgtgcggggagctgtgaccctatcaccggagactgcatcagcagccacacagacatagactggtgtcatgaagttcctgac

SEQ ID NO: 530 - protein, 446 aa, Homo sapiens
KACNPRMGNLALGRKLWADTTCGQNATELYCFYSENTDLTCRQPKCDKCNAAYPHLAHLPSAMADSSFRFPRTWWQSAEDVHREKIQLDLEAEFYFTHLIVMFKSPRPAAMVLDRSQDFGKTWKPYKYFATNCSATFGLEDDVVKKGAICTPKYSSPFPCTGGEVIFKALSPPYDTENPYSAKVQEQLKITNLRVQLLKRQSYPCQRNDLNEEPQHFTHYAIYDFIVKGSCFCNGHADQCIPVHGFRPVKAPGTFHMVHGKCMCKHNTAGSHCQHCAPLYNDRPWEAADGKTGAPNECRACKCNGHADTCHFDVNVWEASGSRSGGVCDDCQHNTEGQYCQRCKPGFYRDLRRPFSAPDACKPCSCHPVGSAVLPANSVTFCDPSNGDCPCKPGVAGRRCDRCMVGYWGFGDYGCRPCDCAGSCDPITGDCISSHTDIDWCHEVPD

SEQ ID NO: 531 - DNA, 1338 bp, Homo sapiens
  CDS (1)..(1338)
aaagcctgcaaccctcggatgggaaatttggctttggggcgaaaactctgggcagacaccacctgcggtcagaatgctaccgaactgtactgcttctacagtgagaacacggatctgacttgtcggcagcccaaatgtgacaagtgcaatgctgcctatcctcacctggctcacctgccatctgccatggcagactcatccttccggtttcctcgcacatggtggcagtctgcggaggatgtgcacagagaaaagatccagttagacctggaagctgaattctacttcactcacctaattgtgatgttcaagtcccccaggccggctgccatggtgctggaccgctcccaggactttgggaaaacatggaagccttataagtactttgcgactaactgctccgctacatttggcctggaagatgatgttgtcaagaagggcgctatttgtactcctaaatactccagtccttttccatgcactggaggagaggttattttcaaagctttgtcaccaccatacgatacagagaacccttacagtgccaaagttcaggagcagctgaagatcaccaaccttcgcgtgcagctgctgaaacgacagtcttatccctgtcagagaaatgacctgaacgaagagcctcaacattttacacactatgcgatctatgatttcattgtcaagggcagctgcttctgcaatggccacgccgatcaatgcatacctgttcatggcttcagacctgtcaaggccccaggaacattccacatggtccatgggaagtgtatgtgtaagcacaacacagcaggcagccactgccagcactgtgccccgttatacaatgaccggccatgggaggcagctgatggcaaaacgggggctcccaacgagtgcagagcccgcaagtgtaatgggcatgctgatacctgtcacttcgacgttaatgtgtgggaggcatcagggaatcgtagtggtggtgtctgtgatgactgtcagcacaacacagaaggacagtattgccagaggtgcaagccaggcttctatcgtgacctgcggagacccttctcagctccagatgcttgcaaaccgtgttcctgccatccagtaggatcagctgtccttcctgccaactcagtgaccttctgcgaccccagcaatggtgactgcccttgcaagcctggggtggcagggcgacgttgtgacaggtgcatggtgggatactggggcttcggagactatggctgtcgaccatgtgactgtgcggggagctgtgaccctatcaccggagactgcatcagcagccacacagacatagactggtgtcatgaagttcctgac

SEQ ID NO: 532 - protein, 446 aa, Homo sapiens
KACNPRMGNLALGRKLWADTTCGQNATELYCFYSENTDLTCRQPKCDKCNAAYPHLAHLPSAMADSSFRFPRTWWQSAEDVHREKIQLDLEAEFYFTHLIVMFKSPRPAAMVLDRSQDFGKTWKPYKYFATNCSATFGLEDDVVKKGAICTPKYSSPFPCTGGEVIFKALSPPYDTENPYSAKVQEQLKITNLRVQLLKRQSYPCQRNDLNEEPQHFTHYAIYDFIVKGSCFCNGHADQCIPVHGFRPVKAPGTFHMVHGKCMCKHNTAGSHCQHCAPLYNDRPWEAADGKTGAPNECRARKCNGHADTCHFDVNVWEASGNRSGGVCDDCQHNTEGQYCQRCKPGFYRDLRRPFSAPDACKPCSCHPVGSAVLPANSVTFCDPSNGDCPCKPGVAGRRCDRCMVGYWGFGDYGCRPCDCAGSCDPITGDCISSHTDIDWCHEVPD

SEQ ID NO: 533 - DNA, 1338 bp, Homo sapiens
  CDS (1)..(1338)
aaagcctgcaaccctcggatgggaaatttggctttggggcgaaaactctgggcagacaccacctgcggtcagaatgctaccgaactgtactgcttctacagtgagaacacggatctgacttgtcggcagcccaaatgtgacaagtgcaatgctgcctatcctcacctggctcacctgccatctgccatggcagactcatccttccggtttcctcgcacatggtggcagtctgcggaggatgtgcacagagaaaagatccagttagacctggaagctgaattctacttcactcacctaattgtgatgttcaagtcccccaggccggctgccatggtgctggaccgctcccaggactttgggaaaacatggaagccttataagtactttgcgactaactgctccgctacatttggcctggaagatgatgttgtcaagaagggcgctatttgtactcctaaatactccagtccttttccatgcactggaggagaggttattttcaaagctttgtcaccaccatacgatacagagaacccttacagtgccaaagttcaggagcagctgaagatcaccaaccttcgcgtgcagctgctgaaacgacagtcttatccctgtcagagaaatgacctgaacgaagagcctcaacattttacacactatgcgatctatgatttcattgtcaagggcagctgcttctgcaatggccacgccgatcaatgcatacctgttcatggcttcagacctgtcaaggccccaggaacattccacatggtccatgggaagtgtatgtgtaagcacaacacagcaggcagccactgccagcactgtgccccgttatacaatgaccggccatgggaggcagctgatggcaaaacgggggctcccaacgagtgcagaacctgcaagtgtaatgggcatgctgatacctgtcacttcgacgttaatgtgtgggaggcatcagggaatcgtagtggtggtgtctgtgatgactgtcagcacaacacagaaggacagtattgccagaggtgcaagccaggcttctatcgtgacctgcggagacccttctcagctccagatgcttgcaaaccgtgttcctgccatccagtaggatcagctgtccttcctgccaactcagtgaccttctgcgaccccagcaatggtgactgcccttgcaagcctggggtggcagggcgacgttgtgacaggtgcatggtgggatactggggcttcggagactatggctgtcgaccatgtgactgtgcggggagctgtgaccctatcaccggagactgcatcagcagccacacagacatagactggtgtcatgaagttcctgac

SEQ ID NO: 534 - protein, 446 aa, Homo sapiens
KACNPRMGNLALGRKLWADTTCGQNATELYCFYSENTDLTCRQPKCDKCNAAYPHLAHLPSAMADSSFRFPRTWWQSAEDVHREKIQLDLEAEFYFTHLIVMFKSPRPAAMVLDRSQDFGKTWKPYKYFATNCSATFGLEDDVVKKGAICTPKYSSPFPCTGGEVIFKALSPPYDTENPYSAKVQEQLKITNLRVQLLKRQSYPCQRNDLNEEPQHFTHYAIYDFIVKGSCFCNGHADQCIPVHGFRPVKAPGTFHMVHGKCMCKHNTAGSHCQHCAPLYNDRPWEAADGKTGAPNECRTCKCNGHADTCHFDVNVWEASGNRSGGVCDDCQHNTEGQYCQRCKPGFYRDLRRPFSAPDACKPCSCHPVGSAVLPANSVTFCDPSNGDCPCKPGVAGRRCDRCMVGYWGFGDYGCRPCDCAGSCDPITGDCISSHTDIDWCHEVPD

SEQ ID NO: 535 - DNA, 1338 bp, Homo sapiens
  CDS (1)..(1338)
aaagcctgcaaccctcggatgggaaatttggctttggggcgaaaactctgggcagacaccacctgcggtcagaatgctaccgaactgtactgcttctacagtgagaacacggatctgacttgtcggcagcccaaatgtgacaagtgcaatgctgcctatcctcacctggctcacctgccatctgccatggcagactcatccttccggtttcctcgcacatggtggcagtctgcggaggatgtgcacagagaaaagatccagttagacctggaagctgaattctacttcactcacctaattgtgatgttcaagtcccccaggccggctgccatggtgctggaccgctcccaggactttgggaaaacatggaagccttataagtactttgcgactaactgctccgctacatttggcctggaagatgatgttgtcaagaagggcgctatttgtactcctaaatactccagtccttttccatgcactggaggagaggttattttcaaagctttgtcaccaccatacgatacagagaacccttacagtgccaaagttcaggagcagctgaagatcaccaaccttcgcgtgcagctgctgaaacgacagtcttatccctgtcagagaaatgacctgaacgaagagcctcaacattttacacactatgcgatctatgatttcattgtcaagggcagctgcttctgcaatggccacgccgatcaatgcatacctgttcatggcttcagacctgtcaaggccccaggaacattccacatggtccatgggaagtgtatgtgtaagcacaacacagcaggcagccactgccagcactgtgccccgttatacaatgaccggccatgggaggcagctgatggcaaaacgggggctcccaacgagtgcagagcctgcaagtgtaatgggcatgctgatacctgtcacttcgacgttaatgtgtgggaggcatcagggaatcgtagtggtggtgtctgtgatgactgtcagcacaacacagaaggacagtattgccagaggtgcaagccaggcttctatcgtgacctgcggagacccttctcagctccagatgcttgcaaaccgtgttcctgccatccagtaggatcagctgtccttcctgccaactcagtgaccttctgcgaccccagcaatggtgactgcccttgcaagcctggggtggcagggcgacgttgtgacaggtgcatggtgggatactggggcttcggagactatggctgtcgaccatgtgactgtgcggggagctgtgaccctatcaccggagactgcatcagcagccacacagacatagactggtgtcatgaagttcctgac

SEQ ID NO: 536 - protein, 446 aa, Homo sapiens
KACNPRMGNLALGRKLWADTTCGQNATELYCFYSENTDLTCRQPKCDKCNAAYPHLAHLPSAMADSSFRFPRTWWQSAEDVHREKIQLDLEAEFYFTHLIVMFKSPRPAAMVLDRSQDFGKTWKPYKYFATNCSATFGLEDDVVKKGAICTPKYSSPFPCTGGEVIFKALSPPYDTENPYSAKVQEQLKITNLRVQLLKRQSYPCQRNDLNEEPQHFTHYAIYDFIVKGSCFCNGHADQCIPVHGFRPVKAPGTFHMVHGKCMCKHNTAGSHCQHCAPLYNDRPWEAADGKTGAPNECRACKCNGHADTCHFDVNVWEASGNRSGGVCDDCQHNTEGQYCQRCKPGFYRDLRRPFSAPDACKPCSCHPVGSAVLPANSVTFCDPSNGDCPCKPGVAGRRCDRCMVGYWGFGDYGCRPCDCAGSCDPITGDCISSHTDIDWCHEVPD

SEQ ID NO: 537 - DNA, 1338 bp, Homo sapiens
  CDS (1)..(1338)
aaagcctgcaaccctcggatgggaaatttggctttggggcgaaaactctgggcagacaccacctgcggtcagaatgctaccgaactgtactgcttctacagtgagaacaaggatctgacttgtcggcagcccaaatgtgacaagtgcaatgctgcctatcctcacctggctcacctgccatctgccatggcagactcatccttccggtttcctcgcacatggtggcagtctgcggaggatgtgcacagagaaaagatccagttagacctggaagctgaattctacttcactcacctaattgtgatgttcaagtcccccaggccggctgccatggtgctggaccgctcccaggactttgggaaaacatggaagccttataagtactttgcgactaactgctccgctacatttggcctggaagatgatgttgtcaagaagggcgctatttgtacttctaaatactccagtccttttccatgcactggaggagaggttattttcaaagctttgtcaccaccacacgatacagagaacccttacagtgccaaagttcaggagcagctgaagatcaccaaccttcgcgtgcagctgctgaaacgacagtcttgtccctgtcagagaaatgacctgaacgaagagcctcaacattttacacactatgcgatctatgatttcattgtcaagggcagctgcttctgcaatggccacgccgatcaatgcatacctgttcatggcttcagacctgtcaaggccccaggaacattccacatggtccatgggaagtgtatgtgtaagcacaacacagcaggcagccactgccagcactgtgccccgttatacaatgaccggccatgggaggcagctgatggcaaaacgggggctcccaacgagtgcagaacctgcaagtgtaatgggcatgctgatacctgtcacttcgacgttaatgtgtgggaggcatcagggaatcgtagtggtggtgtctgtgatgactgtcagcacaacacagaaggacagtattgccagaggtgcaagccaggcttctatcgtgacctgcggagacccttctcagctccagatgcttgcaaaccgtgttcctgccatccagtaggatcagctgtccttcctgccaactcagtgaccttctgcgaccccagcaatggtgactgcccttgcaagcctggggtggcagggcgacgttgtgacaggtgcatggtgggatactggggcttcggagactatggctgtcgaccatgtgactgtgcggggagctgtgaccctatcaccggagactgcatcagcagccacacagacatagactggtgtcatgaagttcctgac

SEQ ID NO: 538 - protein, 446 aa, Homo sapiens
KACNPRMGNLALGRKLWADTTCGQNATELYCFYSENKDLTCRQPKCDKCNAAYPHLAHLPSAMADSSFRFPRTWWQSAEDVHREKIQLDLEAEFYFTHLIVMFKSPRPAAMVLDRSQDFGKTWKPYKYFATNCSATFGLEDDVVKKGAICTSKYSSPFPCTGGEVIFKALSPPHDTENPYSAKVQEQLKITNLRVQLLKRQSCPCQRNDLNEEPQHFTHYAIYDFIVKGSCFCNGHADQCIPVHGFRPVKAPGTFHMVHGKCMCKHNTAGSHCQHCAPLYNDRPWEAADGKTGAPNECRTCKCNGHADTCHFDVNVWEASGNRSGGVCDDCQHNTEGQYCQRCKPGFYRDLRRPFSAPDACKPCSCHPVGSAVLPANSVTFCDPSNGDCPCKPGVAGRRCDRCMVGYWGFGDYGCRPCDCAGSCDPITGDCISSHTDIDWCHEVPD

SEQ ID NO: 539 - DNA, 1338 bp, Homo sapiens
  CDS (1)..(1338)
aaagcctgcaaccctcggatgggaaatttggctttggggcgaaaactctgggcagacaccacctgcggtcagaatgctaccgaactgtactgcttctacagtgagaacaaggatctgacttgtcggcagcccaaatgtgacaagtgcaatgctgcctatcctcacctggctcacctgccatctgccatggcagactcatccttccggtttcctcgcacatggtggcagtctgcggaggatgtgcacagagaaaagatccagttagacctggaagctgaattctacttcactcacctaattgtgatgttcaagtcccccaggccggctgccatggtgctggaccgctcccaggactttgggaaaacatggaagccttataagtactttgcgactaactgctccgctacatttggcctggaagatgatgttgtcaagaagggcgctatttgtacttctaaatactccagtccttttccatgcactggaggagaggttattttcaaagctttgtcaccaccacacgatacagagaacccttacagtgccaaagttcaggagcagctgaagatcaccaaccttcgcgtgcagctgctgaaacgacagtcttgtccctgtcagagaaatgacctgaacgaagagcctcaacattttacacactatgcgatctatgatttcattgtcaagggcagctgcttctgcaatggccacgccgatcaatgcatacctgttcatggcttcagacctgtcaaggccccaggaacattccacatggtccatgggaagtgtatgtgtaagcacaacacagcaggcagccactgccagcactgtgccccgttatacaatgaccggccatgggaggcagctgatggcaaaacgggggctcccaacgagtgcagagcccgcaagtgtaatgggcatgctgatacctgtcacttcgacgttaatgtgtgggaggcatcagggaatcgtagtggtggtgtctgtgatgactgtcagcacaacacagaaggacagtattgccagaggtgcaagccaggcttctatcgtgacctgcggagacccttctcagctccagatgcttgcaaaccgtgttcctgccatccagtaggatcagctgtccttcctgccaactcagtgaccttctgcgaccccagcaatggtgactgcccttgcaagcctggggtggcagggcgacgttgtgacaggtgcatggtgggatactggggcttcggagactatggctgtcgaccatgtgactgtgcggggagctgtgaccctatcaccggagactgcatcagcagccacacagacatagactggtgtcatgaagttcctgac

SEQ ID NO: 540 - protein, 446 aa, Homo sapiens
KACNPRMGNLALGRKLWADTTCGQNATELYCFYSENKDLTCRQPKCDKCNAAYPHLAHLPSAMADSSFRFPRTWWQSAEDVHREKIQLDLEAEFYFTHLIVMFKSPRPAAMVLDRSQDFGKTWKPYKYFATNCSATFGLEDDVVKKGAICTSKYSSPFPCTGGEVIFKALSPPHDTENPYSAKVQEQLKITNLRVQLLKRQSCPCQRNDLNEEPQHFTHYAIYDFIVKGSCFCNGHADQCIPVHGFRPVKAPGTFHMVHGKCMCKHNTAGSHCQHCAPLYNDRPWEAADGKTGAPNECRARKCNGHADTCHFDVNVWEASGNRSGGVCDDCQHNTEGQYCQRCKPGFYRDLRRPFSAPDACKPCSCHPVGSAVLPANSVTFCDPSNGDCPCKPGVAGRRCDRCMVGYWGFGDYGCRPCDCAGSCDPITGDCISSHTDIDWCHEVPD

SEQ ID NO: 541 - DNA, 1338 bp, Homo sapiens
  CDS (1)..(1338)
aaagcctgcaaccctcggatgggaaatttggctttggggcgaaaactctgggcagacaccacctgcggtcagaatgctaccgaactgtactgcttctacagtgagaacaaggatctgacttgtcggcagcccaaatgtgacaagtgcaatgctgcctatcctcacctggctcacctgccatctgccatggcagactcatccttccggtttcctcgcacatggtggcagtctgcggaggatgtgcacagagaaaagatccagttagacctggaagctgaattctacttcactcacctaattgtgatgttcaagtcccccaggccggctgccatggtgctggaccgctcccaggactttgggaaaacatggaagccttataagtactttgcgactaactgctccgctacatttggcctggaagatgatgttgtcaagaagggcgctatttgtacttctaaatactccagtccttttccatgcactggaggagaggttattttcaaagctttgtcaccaccacacgatacagagaacccttacagtgccaaagttcaggagcagctgaagatcaccaaccttcgcgtgcagctgctgaaacgacagtcttgtccctgtcagagaaatgacctgaacgaagagcctcaacattttacacactatgcgatctatgatttcattgtcaagggcagctgcttctgcaatggccacgccgatcaatgcatacctgttcatggcttcagacctgtcaaggccccaggaacattccacatggtccatgggaagtgtatgtgtaagcacaacacagcaggcagccactgccagcactgtgccccgttatacaatgaccggccatgggaggcagctgatggcaaaacgggggctcccaacgagtgcagagcctgcaagtgtaatgggcatgctgatacctgtcacttcgacgttaatgtgtgggaggcatcagggagtcgtagtggtggtgtctgtgatgactgtcagcacaacacagaaggacagtattgccagaggtgcaagccaggcttctatcgtgacctgcggagacccttctcagctccagatgcttgcaaaccgtgttcctgccatccagtaggatcagctgtccttcctgccaactcagtgaccttctgcgaccccagcaatggtgactgcccttgcaagcctggggtggcagggcgacgttgtgacaggtgcatggtgggatactggggcttcggagactatggctgtcgaccatgtgactgtgcggggagctgtgaccctatcaccggagactgcatcagcagccacacagacatagactggtgtcatgaagttcctgac

SEQ ID NO: 542 - protein, 446 aa, Homo sapiens
KACNPRMGNLALGRKLWADTTCGQNATELYCFYSENKDLTCRQPKCDKCNAAYPHLAHLPSAMADSSFRFPRTWWQSAEDVHREKIQLDLEAEFYFTHLIVMFKSPRPAAMVLDRSQDFGKTWKPYKYFATNCSATFGLEDDVVKKGAICTSKYSSPFPCTGGEVIFKALSPPHDTENPYSAKVQEQLKITNLRVQLLKRQSCPCQRNDLNEEPQHFTHYAIYDFIVKGSCFCNGHADQCIPVHGFRPVKAPGTFHMVHGKCMCKHNTAGSHCQHCAPLYNDRPWEAADGKTGAPNECRACKCNGHADTCHFDVNVWEASGSRSGGVCDDCQHNTEGQYCQRCKPGFYRDLRRPFSAPDACKPCSCHPVGSAVLPANSVTFCDPSNGDCPCKPGVAGRRCDRCMVGYWGFGDYGCRPCDCAGSCDPITGDCISSHTDIDWCHEVPD

SEQ ID NO: 543 - DNA, 1338 bp, Homo sapiens
  CDS (1)..(1338)
aaagcctgcaaccctcggatgggaaatttggctttggggcgaaaactctgggcagacaccacctgcggtcagaatgctaccgaactgtactgcttctacagtgagaacaaggatctgacttgtcggcagcccaaatgtgacaagtgcaatgctgcctatcctcacctggctcacctgccatctgccatggcagactcatccttccggtttcctcgcacatggtggcagtctgcggaggatgtgcacagagaaaagatccagttagacctggaagctgaattctacttcactcacctaattgtgatgttcaagtcccccaggccggctgccatggtgctggaccgctcccaggactttgggaaaacatggaagccttataagtactttgcgactaactgctccgctacatttggcctggaagatgatgttgtcaagaagggcgctatttgtacttctaaatactccagtccttttccatgcactggaggagaggttattttcaaagctttgtcaccaccacacgatacagagaacccttacagtgccaaagttcaggagcagctgaagatcaccaaccttcgcgtgcagctgctgaaacgacagtcttgtccctgtcagagaaatgacctgaacgaagagcctcaacattttacacactatgcgatctatgatttcattgtcaagggcagctgcttctgcaatggccacgccgatcaatgcatacctgttcatggcttcagacctgtcaaggccccaggaacattccacatggtccatgggaagtgtatgtgtaagcacaacacagcaggcagccactgccagcactgtgccccgttatacaatgaccggccatgggaggcagctgatggcaaaacgggggctcccaacgagtgcagagcctgcaagtgtaatgggcatgctgatacctgtcacttcgacgttaatgtgtgggaggcatcagggaatcgtagtggtggtgtctgtgatgactgtcagcacaacacagaaggacagtattgccagaggtgcaagccaggcttctatcgtgacctgcggagacccttctcagctccagatgcttgcaaaccgtgttcctgccatccagtaggatcagctgtccttcctgccaactcagtgaccttctgcgaccccagcaatggtgactgcccttgcaagcctggggtggcagggcgacgttgtgacaggtgcatggtgggatactggggcttcggagactatggctgtcgaccatgtgactgtgcggggagctgtgaccctatcaccggagactgcatcagcagccacacagacatagactggtatcatgaagttcctgac

SEQ ID NO: 544 - protein, 446 aa, Homo sapiens
KACNPRMGNLALGRKLWADTTCGQNATELYCFYSENKDLTCRQPKCDKCNAAYPHLAHLPSAMADSSFRFPRTWWQSAEDVHREKIQLDLEAEFYFTHLIVMFKSPRPAAMVLDRSQDFGKTWKPYKYFATNCSATFGLEDDVVKKGAICTSKYSSPFPCTGGEVIFKALSPPHDTENPYSAKVQEQLKITNLRVQLLKRQSCPCQRNDLNEEPQHFTHYAIYDFIVKGSCFCNGHADQCIPVHGFRPVKAPGTFHMVHGKCMCKHNTAGSHCQHCAPLYNDRPWEAADGKTGAPNECRACKCNGHADTCHFDVNVWEASGNRSGGVCDDCQHNTEGQYCQRCKPGFYRDLRRPFSAPDACKPCSCHPVGSAVLPANSVTFCDPSNGDCPCKPGVAGRRCDRCMVGYWGFGDYGCRPCDCAGSCDPITGDCISSHTDIDWYHEVPD

SEQ ID NO: 545 - DNA, 1338 bp, Homo sapiens
  CDS (1)..(1338)
aaagcctgcaaccctcggatgggaaatttggctttggggcgaaaactctgggcagacaccacctgcggtcagaatgctaccgaactgtactgcttctacagtgagaacaaggatctgacttgtcggcagcccaaatgtgacaagtgcaatgctgcctatcctcacctggctcacctgccatctgccatggcagactcatccttccggtttcctcgcacatggtggcagtctgcggaggatgtgcacagagaaaagatccagttagacctggaagctgaattctacttcactcacctaattgtgatgttcaagtcccccaggccggctgccatggtgctggaccgctcccaggactttgggaaaacatggaagccttataagtactttgcgactaactgctccgctacatttggcctggaagatgatgttgtcaagaagggcgctatttgtacttctaaatactccagtccttttccatgcactggaggagaggttattttcaaagctttgtcaccaccacacgatacagagaacccttacagtgccaaagttcaggagcagctgaagatcaccaaccttcgcgtgcagctgctgaaacgacagtcttgtccctgtcagagaaatgacctgaacgaagagcctcaacattttacacactatgcgatctatgatttcattgtcaagggcagctgcttctgcaatggccacgccgatcaatgcatacctgttcatggcttcagacctgtcaaggccccaggaacattccacatggtccatgggaagtgtatgtgtaagcacaacacagcaggcagccactgccagcactgtgccccgttatacaatgaccggccatgggaggcagctgatggcaaaacgggggctcccaacgagtgcagaacccgcaagtgtaatgggcatgctgatacctgtcacttcgacgttaatgtgtgggaggcatcagggaatcgtagtggtggtgtctgtgatgactgtcagcacaacacagaaggacagtattgccagaggtgcaagccaggcttctatcgtgacctgcggagacccttctcagctccagatgcttgcaaaccgtgttcctgccatccagtaggatcagctgtccttcctgccaactcagtgaccttctgcgaccccagcaatggtgactgcccttgcaagcctggggtggcagggcgacgttgtgacaggtgcatggtgggatactggggcttcggagactatggctgtcgaccatgtgactgtgcggggagctgtgaccctatcaccggagactgcatcagcagccacacagacatagactggtgtcatgaagttcctgac

SEQ ID NO: 546 - protein, 446 aa, Homo sapiens
KACNPRMGNLALGRKLWADTTCGQNATELYCFYSENKDLTCRQPKCDKCNAAYPHLAHLPSAMADSSFRFPRTWWQSAEDVHREKIQLDLEAEFYFTHLIVMFKSPRPAAMVLDRSQDFGKTWKPYKYFATNCSATFGLEDDVVKKGAICTSKYSSPFPCTGGEVIFKALSPPHDTENPYSAKVQEQLKITNLRVQLLKRQSCPCQRNDLNEEPQHFTHYAIYDFIVKGSCFCNGHADQCIPVHGFRPVKAPGTFHMVHGKCMCKHNTAGSHCQHCAPLYNDRPWEAADGKTGAPNECRTRKCNGHADTCHFDVNVWEASGNRSGGVCDDCQHNTEGQYCQRCKPGFYRDLRRPFSAPDACKPCSCHPVGSAVLPANSVTFCDPSNGDCPCKPGVAGRRCDRCMVGYWGFGDYGCRPCDCAGSCDPITGDCISSHTDIDWCHEVPD

SEQ ID NO: 547 - DNA, 1338 bp, Homo sapiens
  CDS (1)..(1338)
aaagcctgcaaccctcggatgggaaatttggctttggggcgaaaactctgggcagacaccacctgcggtcagaatgctaccgaactgtactgcttctacagtgagaacaaggatctgacttgtcggcagcccaaatgtgacaagtgcaatgctgcctatcctcacctggctcacctgccatctgccatggcagactcatccttccggtttcctcgcacatggtggcagtctgcggaggatgtgcacagagaaaagatccagttagacctggaagctgaattctacttcactcacctaattgtgatgttcaagtcccccaggccggctgccatggtgctggaccgctcccaggactttgggaaaacatggaagccttataagtactttgcgactaactgctccgctacatttggcctggaagatgatgttgtcaagaagggcgctatttgtacttctaaatactccagtccttttccatgcactggaggagaggttattttcaaagctttgtcaccaccacacgatacagagaacccttacagtgccaaagttcaggagcagctgaagatcaccaaccttcgcgtgcagctgctgaaacgacagtcttgtccctgtcagagaaatgacctgaacgaagagcctcaacattttacacactatgcgatctatgatttcattgtcaagggcagctgcttctgcaatggccacgccgatcaatgcatacctgttcatggcttcagacctgtcaaggccccaggaacattccacatggtccatgggaagtgtatgtgtaagcacaacacagcaggcagccactgccagcactgtgccccgttatacaatgaccggccatgggaggcagctgatggcaaaacgggggctcccaacgagtgcagaacctgcaagtgtaatgggcatgctgatacctgtcacttcgacgttaatgtgtgggaggcatcagggagtcgtagtggtggtgtctgtgatgactgtcagcacaacacagaaggacagtattgccagaggtgcaagccaggcttctatcgtgacctgcggagacccttctcagctccagatgcttgcaaaccgtgttcctgccatccagtaggatcagctgtccttcctgccaactcagtgaccttctgcgaccccagcaatggtgactgcccttgcaagcctggggtggcagggcgacgttgtgacaggtgcatggtgggatactggggcttcggagactatggctgtcgaccatgtgactgtgcggggagctgtgaccctatcaccggagactgcatcagcagccacacagacatagactggtgtcatgaagttcctgac

SEQ ID NO: 548 - protein, 446 aa, Homo sapiens
KACNPRMGNLALGRKLWADTTCGQNATELYCFYSENKDLTCRQPKCDKCNAAYPHLAHLPSAMADSSFRFPRTWWQSAEDVHREKIQLDLEAEFYFTHLIVMFKSPRPAAMVLDRSQDFGKTWKPYKYFATNCSATFGLEDDVVKKGAICTSKYSSPFPCTGGEVIFKALSPPHDTENPYSAKVQEQLKITNLRVQLLKRQSCPCQRNDLNEEPQHFTHYAIYDFIVKGSCFCNGHADQCIPVHGFRPVKAPGTFHMVHGKCMCKHNTAGSHCQHCAPLYNDRPWEAADGKTGAPNECRTCKCNGHADTCHFDVNVWEASGSRSGGVCDDCQHNTEGQYCQRCKPGFYRDLRRPFSAPDACKPCSCHPVGSAVLPANSVTFCDPSNGDCPCKPGVAGRRCDRCMVGYWGFGDYGCRPCDCAGSCDPITGDCISSHTDIDWCHEVPD

SEQ ID NO: 549 - DNA, 1338 bp, Homo sapiens
  CDS (1)..(1338)
aaagcctgcaaccctcggatgggaaatttggctttggggcgaaaactctgggcagacaccacctgcggtcagaatgctaccgaactgtactgcttctacagtgagaacaaggatctgacttgtcggcagcccaaatgtgacaagtgcaatgctgcctatcctcacctggctcacctgccatctgccatggcagactcatccttccggtttcctcgcacatggtggcagtctgcggaggatgtgcacagagaaaagatccagttagacctggaagctgaattctacttcactcacctaattgtgatgttcaagtcccccaggccggctgccatggtgctggaccgctcccaggactttgggaaaacatggaagccttataagtactttgcgactaactgctccgctacatttggcctggaagatgatgttgtcaagaagggcgctatttgtacttctaaatactccagtccttttccatgcactggaggagaggttattttcaaagctttgtcaccaccacacgatacagagaacccttacagtgccaaagttcaggagcagctgaagatcaccaaccttcgcgtgcagctgctgaaacgacagtcttgtccctgtcagagaaatgacctgaacgaagagcctcaacattttacacactatgcgatctatgatttcattgtcaagggcagctgcttctgcaatggccacgccgatcaatgcatacctgttcatggcttcagacctgtcaaggccccaggaacattccacatggtccatgggaagtgtatgtgtaagcacaacacagcaggcagccactgccagcactgtgccccgttatacaatgaccggccatgggaggcagctgatggcaaaacgggggctcccaacgagtgcagaacctgcaagtgtaatgggcatgctgatacctgtcacttcgacgttaatgtgtgggaggcatcagggaatcgtagtggtggtgtctgtgatgactgtcagcacaacacagaaggacagtattgccagaggtgcaagccaggcttctatcgtgacctgcggagacccttctcagctccagatgcttgcaaaccgtgttcctgccatccagtaggatcagctgtccttcctgccaactcagtgaccttctgcgaccccagcaatggtgactgcccttgcaagcctggggtggcagggcgacgttgtgacaggtgcatggtgggatactggggcttcggagactatggctgtcgaccatgtgactgtgcggggagctgtgaccctatcaccggagactgcatcagcagccacacagacatagactggtatcatgaagttcctgac

SEQ ID NO: 550 - protein, 446 aa, Homo sapiens
KACNPRMGNLALGRKLWADTTCGQNATELYCFYSENKDLTCRQPKCDKCNAAYPHLAHLPSAMADSSFRFPRTWWQSAEDVHREKIQLDLEAEFYFTHLIVMFKSPRPAAMVLDRSQDFGKTWKPYKYFATNCSATFGLEDDVVKKGAICTSKYSSPFPCTGGEVIFKALSPPHDTENPYSAKVQEQLKITNLRVQLLKRQSCPCQRNDLNEEPQHFTHYAIYDFIVKGSCFCNGHADQCIPVHGFRPVKAPGTFHMVHGKCMCKHNTAGSHCQHCAPLYNDRPWEAADGKTGAPNECRTCKCNGHADTCHFDVNVWEASGNRSGGVCDDCQHNTEGQYCQRCKPGFYRDLRRPFSAPDACKPCSCHPVGSAVLPANSVTFCDPSNGDCPCKPGVAGRRCDRCMVGYWGFGDYGCRPCDCAGSCDPITGDCISSHTDIDWYHEVPD

SEQ ID NO: 551 - DNA, 1338 bp, Homo sapiens
  CDS (1)..(1338)
aaagcctgcaaccctcggatgggaaatttggctttggggcgaaaactctgggcagacaccacctgcggtcagaatgctaccgaactgtactgcttctacagtgagaacaaggatctgacttgtcggcagcccaaatgtgacaagtgcaatgctgcctatcctcacctggctcacctgccatctgccatggcagactcatccttccggtttcctcgcacatggtggcagtctgcggaggatgtgcacagagaaaagatccagttagacctggaagctgaattctacttcactcacctaattgtgatgttcaagtcccccaggccggctgccatggtgctggaccgctcccaggactttgggaaaacatggaagccttataagtactttgcgactaactgctccgctacatttggcctggaagatgatgttgtcaagaagggcgctatttgtacttctaaatactccagtccttttccatgcactggaggagaggttattttcaaagctttgtcaccaccacacgatacagagaacccttacagtgccaaagttcaggagcagctgaagatcaccaaccttcgcgtgcagctgctgaaacgacagtcttgtccctgtcagagaaatgacctgaacgaagagcctcaacattttacacactatgcgatctatgatttcattgtcaagggcagctgcttctgcaatggccacgccgatcaatgcatacctgttcatggcttcagacctgtcaaggccccaggaacattccacatggtccatgggaagtgtatgtgtaagcacaacacagcaggcagccactgccagcactgtgccccgttatacaatgaccggccatgggaggcagctgatggcaaaacgggggctcccaacgagtgcagaacccgcaagtgtaatgggcatgctgatacctgtcacttcgacgttaatgtgtgggaggcatcagggagtcgtagtggtggtgtctgtgatgactgtcagcacaacacagaaggacagtattgccagaggtgcaagccaggcttctatcgtgacctgcggagacccttctcagctccagatgcttgcaaaccgtgttcctgccatccagtaggatcagctgtccttcctgccaactcagtgaccttctgcgaccccagcaatggtgactgcccttgcaagcctggggtggcagggcgacgttgtgacaggtgcatggtgggatactggggcttcggagactatggctgtcgaccatgtgactgtgcggggagctgtgaccctatcaccggagactgcatcagcagccacacagacatagactggtgtcatgaagttcctgac

SEQ ID NO: 552 - protein, 446 aa, Homo sapiens
KACNPRMGNLALGRKLWADTTCGQNATELYCFYSENKDLTCRQPKCDKCNAAYPHLAHLPSAMADSSFRFPRTWWQSAEDVHREKIQLDLEAEFYFTHLIVMFKSPRPAAMVLDRSQDFGKTWKPYKYFATNCSATFGLEDDVVKKGAICTSKYSSPFPCTGGEVIFKALSPPHDTENPYSAKVQEQLKITNLRVQLLKRQSCPCQRNDLNEEPQHFTHYAIYDFIVKGSCFCNGHADQCIPVHGFRPVKAPGTFHMVHGKCMCKHNTAGSHCQHCAPLYNDRPWEAADGKTGAPNECRTRKCNGHADTCHFDVNVWEASGSRSGGVCDDCQHNTEGQYCQRCKPGFYRDLRRPFSAPDACKPCSCHPVGSAVLPANSVTFCDPSNGDCPCKPGVAGRRCDRCMVGYWGFGDYGCRPCDCAGSCDPITGDCISSHTDIDWCHEVPD

SEQ ID NO: 553 - DNA, 1338 bp, Homo sapiens
  CDS (1)..(1338)
aaagcctgcaaccctcggatgggaaatttggctttggggcgaaaactctgggcagacaccacctgcggtcagaatgctaccgaactgtactgcttctacagtgagaacaaggatctgacttgtcggcagcccaaatgtgacaagtgcaatgctgcctatcctcacctggctcacctgccatctgccatggcagactcatccttccggtttcctcgcacatggtggcagtctgcggaggatgtgcacagagaaaagatccagttagacctggaagctgaattctacttcactcacctaattgtgatgttcaagtcccccaggccggctgccatggtgctggaccgctcccaggactttgggaaaacatggaagccttataagtactttgcgactaactgctccgctacatttggcctggaagatgatgttgtcaagaagggcgctatttgtacttctaaatactccagtccttttccatgcactggaggagaggttattttcaaagctttgtcaccaccacacgatacagagaacccttacagtgccaaagttcaggagcagctgaagatcaccaaccttcgcgtgcagctgctgaaacgacagtcttgtccctgtcagagaaatgacctgaacgaagagcctcaacattttacacactatgcgatctatgatttcattgtcaagggcagctgcttctgcaatggccacgccgatcaatgcatacctgttcatggcttcagacctgtcaaggccccaggaacattccacatggtccatgggaagtgtatgtgtaagcacaacacagcaggcagccactgccagcactgtgccccgttatacaatgaccggccatgggaggcagctgatggcaaaacgggggctcccaacgagtgcagaacccgcaagtgtaatgggcatgctgatacctgtcacttcgacgttaatgtgtgggaggcatcagggaatcgtagtggtggtgtctgtgatgactgtcagcacaacacagaaggacagtattgccagaggtgcaagccaggcttctatcgtgacctgcggagacccttctcagctccagatgcttgcaaaccgtgttcctgccatccagtaggatcagctgtccttcctgccaactcagtgaccttctgcgaccccagcaatggtgactgcccttgcaagcctggggtggcagggcgacgttgtgacaggtgcatggtgggatactggggcttcggagactatggctgtcgaccatgtgactgtgcggggagctgtgaccctatcaccggagactgcatcagcagccacacagacatagactggtatcatgaagttcctgac

SEQ ID NO: 554 - protein, 446 aa, Homo sapiens
KACNPRMGNLALGRKLWADTTCGQNATELYCFYSENKDLTCRQPKCDKCNAAYPHLAHLPSAMADSSFRFPRTWWQSAEDVHREKIQLDLEAEFYFTHLIVMFKSPRPAAMVLDRSQDFGKTWKPYKYFATNCSATFGLEDDVVKKGAICTSKYSSPFPCTGGEVIFKALSPPHDTENPYSAKVQEQLKITNLRVQLLKRQSCPCQRNDLNEEPQHFTHYAIYDFIVKGSCFCNGHADQCIPVHGFRPVKAPGTFHMVHGKCMCKHNTAGSHCQHCAPLYNDRPWEAADGKTGAPNECRTRKCNGHADTCHFDVNVWEASGNRSGGVCDDCQHNTEGQYCQRCKPGFYRDLRRPFSAPDACKPCSCHPVGSAVLPANSVTFCDPSNGDCPCKPGVAGRRCDRCMVGYWGFGDYGCRPCDCAGSCDPITGDCISSHTDIDWYHEVPD

SEQ ID NO: 555 - DNA, 1338 bp, Homo sapiens
  CDS (1)..(1338)
aaagcctgcaaccctcggatgggaaatttggctttggggcgaaaactctgggcagacaccacctgcggtcagaatgctaccgaactgtactgcttctacagtgagaacaaggatctgacttgtcggcagcccaaatgtgacaagtgcaatgctgcctatcctcacctggctcacctgccatctgccatggcagactcatccttccggtttcctcgcacatggtggcagtctgcggaggatgtgcacagagaaaagatccagttagacctggaagctgaattctacttcactcacctaattgtgatgttcaagtcccccaggccggctgccatggtgctggaccgctcccaggactttgggaaaacatggaagccttataagtactttgcgactaactgctccgctacatttggcctggaagatgatgttgtcaagaagggcgctatttgtacttctaaatactccagtccttttccatgcactggaggagaggttattttcaaagctttgtcaccaccacacgatacagagaacccttacagtgccaaagttcaggagcagctgaagatcaccaaccttcgcgtgcagctgctgaaacgacagtcttgtccctgtcagagaaatgacctgaacgaagagcctcaacattttacacactatgcgatctatgatttcattgtcaagggcagctgcttctgcaatggccacgccgatcaatgcatacctgttcatggcttcagacctgtcaaggccccaggaacattccacatggtccatgggaagtgtatgtgtaagcacaacacagcaggcagccactgccagcactgtgccccgttatacaatgaccggccatgggaggcagctgatggcaaaacgggggctcccaacgagtgcagaacctgcaagtgtaatgggcatgctgatacctgtcacttcgacgttaatgtgtgggaggcatcagggagtcgtagtggtggtgtctgtgatgactgtcagcacaacacagaaggacagtattgccagaggtgcaagccaggcttctatcgtgacctgcggagacccttctcagctccagatgcttgcaaaccgtgttcctgccatccagtaggatcagctgtccttcctgccaactcagtgaccttctgcgaccccagcaatggtgactgcccttgcaagcctggggtggcagggcgacgttgtgacaggtgcatggtgggatactggggcttcggagactatggctgtcgaccatgtgactgtgcggggagctgtgaccctatcaccggagactgcatcagcagccacacagacatagactggtatcatgaagttcctgac

SEQ ID NO: 556 - protein, 446 aa, Homo sapiens
KACNPRMGNLALGRKLWADTTCGQNATELYCFYSENKDLTCRQPKCDKCNAAYPHLAHLPSAMADSSFRFPRTWWQSAEDVHREKIQLDLEAEFYFTHLIVMFKSPRPAAMVLDRSQDFGKTWKPYKYFATNCSATFGLEDDVVKKGAICTSKYSSPFPCTGGEVIFKALSPPHDTENPYSAKVQEQLKITNLRVQLLKRQSCPCQRNDLNEEPQHFTHYAIYDFIVKGSCFCNGHADQCIPVHGFRPVKAPGTFHMVHGKCMCKHNTAGSHCQHCAPLYNDRPWEAADGKTGAPNECRTCKCNGHADTCHFDVNVWEASGSRSGGVCDDCQHNTEGQYCQRCKPGFYRDLRRPFSAPDACKPCSCHPVGSAVLPANSVTFCDPSNGDCPCKPGVAGRRCDRCMVGYWGFGDYGCRPCDCAGSCDPITGDCISSHTDIDWYHEVPD

SEQ ID NO: 557 - DNA, 1338 bp, Homo sapiens
  CDS (1)..(1338)
aaagcctgcaaccctcggatgggaaatttggctttggggcgaaaactctgggcagacaccacctgcggtcagaatgctaccgaactgtactgcttctacagtgagaacaaggatctgacttgtcggcagcccaaatgtgacaagtgcaatgctgcctatcctcacctggctcacctgccatctgccatggcagactcatccttccggtttcctcgcacatggtggcagtctgcggaggatgtgcacagagaaaagatccagttagacctggaagctgaattctacttcactcacctaattgtgatgttcaagtcccccaggccggctgccatggtgctggaccgctcccaggactttgggaaaacatggaagccttataagtactttgcgactaactgctccgctacatttggcctggaagatgatgttgtcaagaagggcgctatttgtacttctaaatactccagtccttttccatgcactggaggagaggttattttcaaagctttgtcaccaccacacgatacagagaacccttacagtgccaaagttcaggagcagctgaagatcaccaaccttcgcgtgcagctgctgaaacgacagtcttgtccctgtcagagaaatgacctgaacgaagagcctcaacattttacacactatgcgatctatgatttcattgtcaagggcagctgcttctgcaatggccacgccgatcaatgcatacctgttcatggcttcagacctgtcaaggccccaggaacattccacatggtccatgggaagtgtatgtgtaagcacaacacagcaggcagccactgccagcactgtgccccgttatacaatgaccggccatgggaggcagctgatggcaaaacgggggctcccaacgagtgcagaacccgcaagtgtaatgggcatgctgatacctgtcacttcgacgttaatgtgtgggaggcatcagggagtcgtagtggtggtgtctgtgatgactgtcagcacaacacagaaggacagtattgccagaggtgcaagccaggcttctatcgtgacctgcggagacccttctcagctccagatgcttgcaaaccgtgttcctgccatccagtaggatcagctgtccttcctgccaactcagtgaccttctgcgaccccagcaatggtgactgcccttgcaagcctggggtggcagggcgacgttgtgacaggtgcatggtgggatactggggcttcggagactatggctgtcgaccatgtgactgtgcggggagctgtgaccctatcaccggagactgcatcagcagccacacagacatagactggtatcatgaagttcctgac

SEQ ID NO: 558 - protein, 446 aa, Homo sapiens
KACNPRMGNLALGRKLWADTTCGQNATELYCFYSENKDLTCRQPKCDKCNAAYPHLAHLPSAMADSSFRFPRTWWQSAEDVHREKIQLDLEAEFYFTHLIVMFKSPRPAAMVLDRSQDFGKTWKPYKYFATNCSATFGLEDDVVKKGAICTSKYSSPFPCTGGEVIFKALSPPHDTENPYSAKVQEQLKITNLRVQLLKRQSCPCQRNDLNEEPQHFTHYAIYDFIVKGSCFCNGHADQCIPVHGFRPVKAPGTFHMVHGKCMCKHNTAGSHCQHCAPLYNDRPWEAADGKTGAPNECRTRKCNGHADTCHFDVNVWEASGSRSGGVCDDCQHNTEGQYCQRCKPGFYRDLRRPFSAPDACKPCSCHPVGSAVLPANSVTFCDPSNGDCPCKPGVAGRRCDRCMVGYWGFGDYGCRPCDCAGSCDPITGDCISSHTDIDWYHEVPD

SEQ ID NO: 559 - protein, 9 aa, Artificial Sequence
  synthetic peptide added at the C-terminus of netrin 4
GSELGTKLT

SEQ ID NO: 560 - DNA, 26 bp, Artificial Sequence
  synthetic oligonuclotide sense Netrin 4
ttctagacatggggagctgcgcgcgg

SEQ ID NO: 561 - DNA, 25 bp, Artificial Sequence
  synthetic oligonuclotide antisense Netrin 4
cattaacgtcgaactgacaggtatc

SEQ ID NO: 562 - DNA, 25 bp, Artificial Sequence
  synthetic oligonuclotide sense Netrin 4
agcactgtgccccgttatacaatga

SEQ ID NO: 563 - DNA, 34 bp, Artificial Sequence
  synthetic oligonuclotide antisense Netrin 4
cgggatccacttgcactctctttttaaaatatcc

SEQ ID NO: 564 - DNA, 26 bp, Artificial Sequence
  synthetic oligonuclotide sense Netrin 4
ttctagacatggggagctgcgcgcgg

SEQ ID NO: 565 - DNA, 34 bp, Artificial Sequence; identical to SEQ ID NO: 563
  synthetic oligonuclotide antisense Netrin 4

1-15. (canceled)

16. A mutated protein comprising or consisting of the sequence of wild type netrin 4, represented by SEQ ID NO: 2, having from 1 to 15 mutations to said wild type protein, said mutated protein having a mutation at the amino acid at position 331, and said protein being possibly mutated in one at least of the amino acids at the following positions: 13, 68, 183, 205, 234, 332, 353, 472, 515, 589, 625, 626, 627 and 628,
or, truncated protein derived from said mutated protein, wherein
the 19 first contiguous, or the 31 first contiguous amino acids at the N-terminus part of said mutated protein are deleted, and/or
said mutated protein being deleted of all the amino acids located after the amino acid in position 477 or of the all amino acids located after the amino acid in position 515,
with the proviso that
a. the mutated protein which contains 9 mutations and in which the amino acids at the positions 472 and 589 and 625 and 626 and 627 and 628 are wild type, is excluded,
b. the mutated proteins which contain 13 mutations and in which the amino acids at the positions 13 and 331, or 13 and 332, or 13 and 472 are wild type, are excluded,
c. the mutated proteins which contain 12 mutations and in which the amino acids at the following positions 13 and 331 and 332, are wild type, are excluded, or
d. when said mutated protein has 14 mutations and a wild type amino acid in position 13, or has 15 mutations, said mutated protein contains a nine amino acid extension at the C-terminus,
e. the truncated proteins wherein the mutated protein is only deleted of all amino acids located after the amino acid in position 477 or only after the amino acid in position 515, and which contain only one mutation at position 353 or 472, or which contain only two mutations at position 332 and 353, or 332 and 472, or 353 and 472, or contain only three mutations at the positions 332 and 353 and 472, are excluded, and
f. the truncated proteins that consist of the following sequence: SEQ ID NO: 188, SEQ ID NO: 198, SEQ ID NO: 266, SEQ ID NO: 320 and SEQ ID NO: 328, are excluded.

17. A mutated protein, or a truncated protein derived from said mutated protein according to claim 16, wherein the sequence of said mutated protein contains:
two or three or four mutations of the amino acids at 13, 68, 183, 205, 234, 331, 332, 353, 472, 515, 589, 625, 626, 627 and 628, or
two or three or four mutations of the amino acids at 13, 68, 183, 205, 234, 331, 332, 353, 472, 515, 589, 625, 626, 627 and 628, and contains a nine amino acid extension at the C-terminus, or
ten or eleven or twelve or thirteen or fourteen mutations of the amino acids at 13, 68, 183, 205, 234, 331, 332, 353, 472, 515, 589, 625, 626, 627 and 628,
ten or eleven or twelve or thirteen, or fourteen or fifteen mutations of the amino acids at the positions 13, 68, 183, 205, 234, 331, 332, 353, 472, 515, 589, 625, 626, 627 and 628 and contains a nine amino acid extension at the C-terminus.

18. A mutated protein according to claim 17, consisting of:
SEQ ID NO: 6 or SEQ ID NO: 8, or
the sequence of netrin 4, represented by SEQ ID NO: 2, containing
one or two or three or four mutations and characterized in that it consists of one of the following sequence SEQ ID NO: 2q, q varying from 31 to 32 and from 33 to 39, or
ten or eleven or twelve or thirteen or fourteen mutations and characterized in that it consists of one of the following sequence of SEQ ID NO: 2q, q varying from 6 to 8, from 12 to 14, 18, 20, from 23 to 24, and 29, or
a truncated mutated protein derived from said mutated protein, consisting of one of the following sequence SEQ ID NO: 80, SEQ ID NO: 84, SEQ ID NO: 86, SEQ ID NO: 88, SEQ ID NO: 96, SEQ ID NO: 98, SEQ ID NO: 100, SEQ ID NO: 108, SEQ ID NO: 112, SEQ ID NO: 120, SEQ ID NO: 122, SEQ ID NO: 124, SEQ ID NO: 126, SEQ ID NO: 128, SEQ ID NO: 130, SEQ ID NO: 132, SEQ ID NO: 134, SEQ ID NO: 138, SEQ ID NO: 140, SEQ ID NO: 142, SEQ ID NO: 150, SEQ ID NO: 152, SEQ ID NO: 154, SEQ ID NO: 162, SEQ ID NO: 166, SEQ ID NO: 174, SEQ ID NO: 176, SEQ ID NO: 178, SEQ ID NO: 180, SEQ ID NO: 182, SEQ ID NO: 184, SEQ ID NO: 186, SEQ ID NO: 190, SEQ ID NO: 194, SEQ ID NO: 196, SEQ ID NO: 206, SEQ ID NO: 208, SEQ ID NO: 210, SEQ ID NO: 218, SEQ ID NO: 222, SEQ ID NO: 228, SEQ ID NO: 230, SEQ ID NO: 232, SEQ ID NO: 240, SEQ ID NO: 244, SEQ ID NO: 252, SEQ ID NO: 254, SEQ ID NO: 256, SEQ ID NO: 258, SEQ ID NO: 260, SEQ ID NO: 262, SEQ ID NO: 264, SEQ ID NO: 270, SEQ ID NO: 272, SEQ ID NO: 274, SEQ ID NO: 282, SEQ ID NO: 284, SEQ ID NO: 286, SEQ ID NO: 294, SEQ ID NO: 298, SEQ ID NO: 306, SEQ ID NO: 308, SEQ ID NO: 310, SEQ ID NO: 312, SEQ ID NO: 314, SEQ ID NO: 316, SEQ ID NO: 318, SEQ ID NO: 324, SEQ ID NO: 326, SEQ ID NO: 336, SEQ ID NO: 338, SEQ ID NO: 340, SEQ ID NO: 348, SEQ ID NO: 352, SEQ ID NO: 360, SEQ ID NO: 362, SEQ ID NO: 364, SEQ ID NO: 366, SEQ ID NO: 368, SEQ ID NO: 370, SEQ ID NO: 372, SEQ ID NO: 374, SEQ ID NO: 376, SEQ ID NO: 380, SEQ ID NO: 382, SEQ ID NO: 384, SEQ ID NO: 392, SEQ ID NO: 394, SEQ ID NO: 396, SEQ ID NO: 404, SEQ ID NO: 408, SEQ ID NO: 414, SEQ ID NO: 416, SEQ ID NO: 418, SEQ ID NO: 426, SEQ ID NO: 430, SEQ ID NO: 438, SEQ ID NO: 440, SEQ ID NO: 442, SEQ ID NO: 444, SEQ ID NO: 446, SEQ ID NO: 448, SEQ ID NO: 450, SEQ ID NO: 452, SEQ ID NO: 456, SEQ ID NO: 458, SEQ ID NO: 460, SEQ ID NO: 468, SEQ ID NO: 470, SEQ ID NO: 472, SEQ ID NO: 480, SEQ ID NO: 484, SEQ ID NO: 492, SEQ ID NO: 494, SEQ ID NO: 496, SEQ ID NO: 498, SEQ ID NO: 500, SEQ ID NO: 502, SEQ ID NO: 504, SEQ ID NO: 506, SEQ ID NO: 510, SEQ ID NO: 512, SEQ ID NO: 514, SEQ ID NO: 522, SEQ ID NO: 524, SEQ ID NO: 526, SEQ ID NO: 534, SEQ ID NO: 538, SEQ ID NO: 546, SEQ ID NO: 548, SEQ ID NO: 550, SEQ ID NO: 552, SEQ ID NO: 554, SEQ ID NO: 556 and SEQ ID NO: 558.

19. A nucleotide sequence coding for
a mutated protein comprising or consisting of the sequence of wild type netrin 4, represented by SEQ ID NO: 2, having from 1 to 15 mutations to said wild type protein, said mutated protein having a mutation at the amino acid at position 331, and said protein being possibly mutated in one at least of the amino acids at the following positions: 13, 68, 183, 205, 234, 332, 353, 472, 515, 589, 625, 626, 627 and 628
or, truncated protein derived from said mutated protein, wherein
the 19 first contiguous, or the 31 first contiguous amino acids at the N-terminus part of said mutated protein are deleted, and/or
said mutated protein being deleted of all the amino acids located after the amino acid in position 477 or of the all amino acids located after the amino acid in position 515,
with the proviso that
a. the mutated protein which contains 9 mutations and in which the amino acids at the positions 472 and 589 and 625 and 626 and 627 and 628 are wild type, is excluded,
b. the mutated proteins which contain 13 mutations and in which the amino acids at the positions 13 and 331, or 13 and 332, or 13 and 472 are wild type, are excluded,
c. the mutated proteins which contain 12 mutations and in which the amino acids at the following positions 13 and 331 and 332, are wild type, are excluded, or
d. when said mutated protein has 14 mutations and a wild type amino acid in position 13, or has 15 mutations, said mutated protein contains a nine amino acid extension at the C-terminus,
e. the truncated proteins wherein the mutated protein is only deleted of all amino acids located after the amino acid in position 477 or only after the amino acid in position 515, and which contain only one mutation at position 353 or 472, or which contain only two mutations at position 332 and 353, or 332 and 472, or 353 and 472, or contain only three mutations at the positions 332 and 353 and 472, are excluded, and
f. the truncated proteins that consist of the following sequence: SEQ ID NO: 188, SEQ ID NO: 198, SEQ ID NO: 266, SEQ ID NO: 320 and SEQ ID NO: 328, are excluded.

20. The nucleotide sequence according to claim 19, said sequence comprising or consisting of one of the following sequences SEQ ID NO: 5, SEQ ID NO: 7, SEQ ID NO: 11, SEQ ID NO: 13, SEQ ID NO: 15, SEQ ID NO: 23, SEQ ID NO: 25, SEQ ID NO: 27, SEQ ID NO: 35, SEQ ID NO: 39, SEQ ID NO: 45, SEQ ID NO: 47, SEQ ID NO: 49, SEQ ID NO: 57, SEQ ID NO: 61, SEQ ID NO: 65, SEQ ID NO: 67, SEQ ID NO: 69, SEQ ID NO: 71, SEQ ID NO: 73, SEQ ID NO: 75, SEQ ID NO: 77, SEQ ID NO: 79, SEQ ID NO: 83, SEQ ID NO: 85, SEQ ID NO: 87, SEQ ID NO: 95, SEQ ID NO: 97, SEQ ID NO: 99, SEQ ID NO: 107, SEQ ID NO: 111, SEQ ID NO: 119, SEQ ID NO: 121, SEQ ID NO: 123, SEQ ID NO: 125, SEQ ID NO: 127, SEQ ID NO: 129, SEQ ID NO: 131, SEQ ID NO: 133, SEQ ID NO: 137, SEQ ID NO: 139, SEQ ID NO: 141, SEQ ID NO: 149, SEQ ID NO: 151, SEQ ID NO: 153, SEQ ID NO: 161, SEQ ID NO: 165, SEQ ID NO: 173, SEQ ID NO: 175, SEQ ID NO: 177, SEQ ID NO: 179, SEQ ID NO: 181, SEQ ID NO: 183, SEQ ID NO: 185, SEQ ID NO: 189, SEQ ID NO: 193, SEQ ID NO: 195, SEQ ID NO: 205, SEQ ID NO: 207, SEQ ID NO: 209, SEQ ID NO: 217, SEQ ID NO: 221, SEQ ID NO: 227, SEQ ID NO: 229, SEQ ID NO: 231, SEQ ID NO: 239, SEQ ID NO: 243, SEQ ID NO: 251, SEQ ID NO: 253, SEQ ID NO: 255, SEQ ID NO: 257, SEQ ID NO: 259, SEQ ID NO: 261, SEQ ID NO: 263, SEQ ID NO: 269, SEQ ID NO: 271, SEQ ID NO: 281, SEQ ID NO: 283, SEQ ID NO: 285, SEQ ID NO: 293, SEQ ID NO: 297, SEQ ID NO: 305, SEQ ID NO: 307, SEQ ID NO: 309, SEQ ID NO: 311, SEQ ID NO: 313, SEQ ID NO: 315, SEQ ID NO: 317, SEQ ID NO: 323, SEQ ID NO: 325, SEQ ID NO: 335, SEQ ID NO: 337, SEQ ID NO: 339, SEQ ID NO: 347, SEQ ID NO: 351, SEQ ID NO: 359, SEQ ID NO: 361, SEQ ID NO: 363, SEQ ID NO: 365, SEQ ID NO: 367, SEQ ID NO: 369, SEQ ID NO: 371, SEQ ID NO: 373, SEQ ID NO: 375, SEQ ID NO: 379, SEQ ID NO: 381, SEQ ID NO: 383, SEQ ID NO: 391, SEQ ID NO: 393, SEQ ID NO: 395, SEQ ID NO: 403, SEQ ID NO: 407, SEQ ID NO: 413, SEQ ID NO: 415, SEQ ID NO: 417, SEQ ID NO: 425, SEQ ID NO: 429, SEQ ID NO: 437, SEQ ID NO: 439, SEQ ID NO: 441, SEQ ID NO: 443, SEQ ID NO: 445, SEQ ID NO: 447, SEQ ID NO: 449, SEQ ID NO: 451, SEQ ID NO: 455, SEQ ID NO: 457, SEQ ID NO: 459, SEQ ID NO: 467, SEQ ID NO: 469, SEQ ID NO: 471, SEQ ID NO: 479, SEQ ID NO: 483, SEQ ID NO: 491, SEQ ID NO: 493, SEQ ID NO: 495, SEQ ID NO: 497, SEQ ID NO: 499, SEQ ID NO: 501, SEQ ID NO: 503, SEQ ID NO: 505, SEQ ID NO: 509, SEQ ID NO: 511, SEQ ID NO: 513, SEQ ID NO: 521, SEQ ID NO: 523, SEQ ID NO: 525, SEQ ID NO: 533, SEQ ID NO: 537, SEQ ID NO: 545, SEQ ID NO: 547, SEQ ID NO: 549, SEQ ID NO: 551, SEQ ID NO: 553, SEQ ID NO: 555 and SEQ ID NO: 557.

21. A recombinant vector comprising
a nucleotide sequence coding for a mutated protein comprising or consisting of the sequence of wild type netrin 4, represented by SEQ ID NO: 2, having from 1 to 15 mutations to said wild type protein, said mutated protein having a mutation at the amino acid at position 331, and said protein being possibly mutated in one at least of the amino acids at the following positions: 13, 68, 183, 205, 234, 332, 353, 472, 515, 589, 625, 626, 627 and 628
or, truncated protein derived from said mutated protein, wherein
the 19 first contiguous, or the 31 first contiguous amino acids at the N-terminus part of said mutated protein are deleted, and/or
said mutated protein being deleted of all the amino acids located after the amino acid in position 477 or of the all amino acids located after the amino acid in position 515,
with the proviso that
a. the mutated protein which contains 9 mutations and in which the amino acids at the positions 472 and 589 and 625 and 626 and 627 and 628 are wild type, is excluded,
b. the mutated proteins which contain 13 mutations and in which the amino acids at the positions 13 and 331, or 13 and 332, or 13 and 472 are wild type, are excluded,
c. the mutated proteins which contain 12 mutations and in which the amino acids at the following positions 13 and 331 and 332, are wild type, are excluded, or
d. when said mutated protein has 14 mutations and a wild type amino acid in position 13, or has 15 mutations, said mutated protein contains a nine amino acid extension at the C-terminus,
e. the truncated proteins wherein the mutated protein is only deleted of all amino acids located after the amino acid in position 477 or only after the amino acid in position 515, and which contain only one mutation at position 353 or 472, or which contain only two mutations at position 332 and 353, or 332 and 472, or 353 and 472, or contain only three mutations at the positions 332 and 353 and 472, are excluded, and
f. the truncated proteins that consist of the following sequence: SEQ ID NO: 188, SEQ ID NO: 198, SEQ ID NO: 266, SEQ ID NO: 320 and SEQ ID NO: 328, are excluded.

22. The recombinant vector according to claim 21, comprising of one of the following sequences SEQ ID NO: 5, SEQ ID NO: 7, SEQ ID NO: 11, SEQ ID NO: 13, SEQ ID NO: 15, SEQ ID NO: 23, SEQ ID NO: 25, SEQ ID NO: 27, SEQ ID NO: 35, SEQ ID NO: 39, SEQ ID NO: 45, SEQ ID NO: 47, SEQ ID NO: 49, SEQ ID NO: 57, SEQ ID NO: 61, SEQ ID NO: 65, SEQ ID NO: 67, SEQ ID NO: 69, SEQ ID NO: 71, SEQ ID NO: 73, SEQ ID NO: 75, SEQ ID NO: 77, SEQ ID NO: 79, SEQ ID NO: 83, SEQ ID NO: 85, SEQ ID NO: 87, SEQ ID NO: 95, SEQ ID NO: 97, SEQ ID NO: 99, SEQ ID NO: 107, SEQ ID NO: 111, SEQ ID NO: 119, SEQ ID NO: 121, SEQ ID NO: 123, SEQ ID NO: 125, SEQ ID NO: 127, SEQ ID NO: 129, SEQ ID NO: 131, SEQ ID NO: 133, SEQ ID NO: 137, SEQ ID NO: 139, SEQ ID NO: 141, SEQ ID NO: 149, SEQ ID NO: 151, SEQ ID NO: 153, SEQ ID NO: 161, SEQ ID NO: 165, SEQ ID NO: 173, SEQ ID NO: 175, SEQ ID NO: 177, SEQ ID NO: 179, SEQ ID NO: 181, SEQ ID NO: 183, SEQ ID NO: 185, SEQ ID NO: 189, SEQ ID NO: 193, SEQ ID NO: 195, SEQ ID NO: 205, SEQ ID NO: 207, SEQ ID NO: 209, SEQ ID NO: 217, SEQ ID NO: 221, SEQ ID NO: 227, SEQ ID NO: 229, SEQ ID NO: 231, SEQ ID NO: 239, SEQ ID NO: 243, SEQ ID NO: 251, SEQ ID NO: 253, SEQ ID NO: 255, SEQ ID NO: 257, SEQ ID NO: 259, SEQ ID NO: 261, SEQ ID NO: 263, SEQ ID NO: 269, SEQ ID NO: 271, SEQ ID NO: 281, SEQ ID NO: 283, SEQ ID NO: 285, SEQ ID NO: 293, SEQ ID NO: 297, SEQ ID NO: 305, SEQ ID NO: 307, SEQ ID NO: 309, SEQ ID NO: 311, SEQ ID NO: 313, SEQ ID NO: 315, SEQ ID NO: 317, SEQ ID NO: 323, SEQ ID NO: 325, SEQ ID NO: 335, SEQ ID NO: 337, SEQ ID NO: 339, SEQ ID NO: 347, SEQ ID NO: 351, SEQ ID NO: 359, SEQ ID NO: 361, SEQ ID NO: 363, SEQ ID NO: 365, SEQ ID NO: 367, SEQ ID NO: 369, SEQ ID NO: 371, SEQ ID NO: 373, SEQ ID NO: 375, SEQ ID NO: 379, SEQ ID NO: 381, SEQ ID NO: 383, SEQ ID NO: 391, SEQ ID NO: 393, SEQ ID NO: 395, SEQ ID NO: 403, SEQ ID NO: 407, SEQ ID NO: 413, SEQ ID NO: 415, SEQ ID NO: 417, SEQ ID NO: 425, SEQ ID NO: 429, SEQ ID NO: 437, SEQ ID NO: 439, SEQ ID NO: 441, SEQ ID NO: 443, SEQ ID NO: 445, SEQ ID NO: 447, SEQ ID NO: 449, SEQ ID NO: 451, SEQ ID NO: 455, SEQ ID NO: 457, SEQ ID NO: 459, SEQ ID NO: 467, SEQ ID NO: 469, SEQ ID NO: 471, SEQ ID NO: 479, SEQ ID NO: 483, SEQ ID NO: 491, SEQ ID NO: 493, SEQ ID NO: 495, SEQ ID NO: 497, SEQ ID NO: 499, SEQ ID NO: 501, SEQ ID NO: 503, SEQ ID NO: 505, SEQ ID NO: 509, SEQ ID NO: 511, SEQ ID NO: 513, SEQ ID NO: 521, SEQ ID NO: 523, SEQ ID NO: 525, SEQ ID NO: 533, SEQ ID NO: 537, SEQ ID NO: 545, SEQ ID NO: 547, SEQ ID NO: 549, SEQ ID NO: 551, SEQ ID NO: 553, SEQ ID NO: 555 and SEQ ID NO: 557.

23. The recombinant vector according to claim 21, characterized in that it contains the elements necessary for the expression in a host cell of the polypeptides encoded by said nucleotide sequence.

24. The recombinant vector according to claim 21, said vector being chosen among a plasmid, a cosmid, a phage or virus DNA

25. An antibody, characterized in that it is specifically directed against
a mutated protein comprising or consisting of the sequence of wild type netrin 4, represented by SEQ ID NO: 2, having from 1 to 15 mutations to said wild type protein, said mutated protein having a mutation at the amino acid at position 331, and said protein being possibly mutated in one at least of the amino acids at the following positions: 13, 68, 183, 205, 234, 332, 353, 472, 515, 589, 625, 626, 627 and 628
or, truncated protein derived from said mutated protein, wherein
the 19 first contiguous, or the 31 first contiguous amino acids at the N-terminus part of said mutated protein are deleted, and/or
said mutated protein being deleted of all the amino acids located after the amino acid in position 477 or of the all amino acids located after the amino acid in position 515,
with the proviso that
a. the mutated protein which contains 9 mutations and in which the amino acids at the positions 472 and 589 and 625 and 626 and 627 and 628 are wild type, is excluded,
b. the mutated proteins which contain 13 mutations and in which the amino acids at the positions 13 and 331, or 13 and 332, or 13 and 472 are wild type, are excluded,
c. the mutated proteins which contain 12 mutations and in which the amino acids at the following positions 13 and 331 and 332, are wild type, are excluded, or
d. when said mutated protein has 14 mutations and a wild type amino acid in position 13, or has 15 mutations, said mutated protein contains a nine amino acid extension at the C-terminus,
e. the truncated proteins wherein the mutated protein is only deleted of all amino acids located after the amino acid in position 477 or only after the amino acid in position 515, and which contain only one mutation at position 353 or 472, or which contain only two mutations at position 332 and 353, or 332 and 472, or 353 and 472, or contain only three mutations at the positions 332 and 353 and 472, are excluded, and
the truncated proteins that consist of the following sequence: SEQ ID NO: 188, SEQ ID NO: 198, SEQ ID NO: 266, SEQ ID NO: 320 and SEQ ID NO: 328, are excluded.

26. An anti-idiotypic, preferably a Fab fragment of said anti-idiotipic antibody, characterized in that it is specifically directed against the antibody of claim 21.

27. A pharmaceutical composition comprising as active substance
a mutated protein comprising or consisting of the sequence of wild type netrin 4, represented by SEQ ID NO: 2, having from 1 to 15 mutations to said wild type protein, said mutated protein having a mutation at the amino acid at position 331, and said protein being possibly mutated in one at least of the amino acids at the following positions: 13, 68, 183, 205, 234, 332, 353, 472, 515, 589, 625, 626, 627 and 628,
or, truncated protein derived from said mutated protein, wherein
the 19 first contiguous, or the 31 first contiguous amino acids at the N-terminus part of said mutated protein are deleted, and/or
said mutated protein being deleted of all the amino acids located after the amino acid in position 477 or of the all amino acids located after the amino acid in position 515,
with the proviso that
a. the mutated protein which contains 9 mutations and in which the amino acids at the positions 472 and 589 and 625 and 626 and 627 and 628 are wild type, is excluded,
b. the mutated proteins which contain 13 mutations and in which the amino acids at the positions 13 and 331, or 13 and 332, or 13 and 472 are wild type, are excluded,
c. the mutated proteins which contain 12 mutations and in which the amino acids at the following positions 13 and 331 and 332, are wild type, are excluded, or
d. when said mutated protein has 14 mutations and a wild type amino acid in position 13, or has 15 mutations, said mutated protein contains a nine amino acid extension at the C-terminus,
e. the truncated proteins wherein the mutated protein is only deleted of all amino acids located after the amino acid in position 477 or only after the amino acid in position 515, and which contain only one mutation at position 353 or 472, or which contain only two mutations at position 332 and 353, or 332 and 472, or 353 and 472, or contain only three mutations at the positions 332 and 353 and 472, are excluded, and
the truncated proteins that consist of the following sequence: SEQ ID NO: 188, SEQ ID NO: 198, SEQ ID NO: 266, SEQ ID NO: 320 and SEQ ID NO: 328, are excluded, or
a nucleic acid sequence coding for said mutated protein, or truncated protein, or
a vector comprising a nucleic acid sequence coding for said mutated protein.
in association with a pharmaceutically acceptable carrier.

28. A pharmaceutical composition according to claim 27, further comprising pericytes or vascular smooth muscle cells

29. A method for the treatment of pathologies involving the inhibition of endothelial cell proliferation and/or migration chosen from the group consisting of: cancers and leukaemia, myopia-complicating choroidal neovascularization, cornea neovascularization, in particular graft rejection, glaucoma, diabetic retinopathies or premature retinopathies, rheumatoid arthritis, psoriasis arthritis, angioma, angiosarcoma, Castleman's disease, and Kaposi's sarcoma, or for the treatment of obesity or retinal neovascularization,
said method comprising the administration in a patient in a need thereof of a pharmaceutically effective amount of:
a mutated protein comprising or consisting of the sequence of wild type netrin 4, represented by SEQ ID NO: 2, having from 1 to 15 mutations to said wild type protein, said mutated protein having a mutation at the amino acid at position 331, and said protein being possibly mutated in one at least of the amino acids at the following positions: 13, 68, 183, 205, 234, 332, 353, 472, 515, 589, 625, 626, 627 and 628
or, truncated protein derived from said mutated protein, wherein
the 19 first contiguous, or the 31 first contiguous amino acids at the N-terminus part of said mutated protein are deleted, and/or
said mutated protein being deleted of all the amino acids located after the amino acid in position 477 or of the all amino acids located after the amino acid in position 515,
with the proviso that
a. the mutated protein which contains 9 mutations and in which the amino acids at the positions 472 and 589 and 625 and 626 and 627 and 628 are wild type, is excluded,
b. the mutated proteins which contain 13 mutations and in which the amino acids at the positions 13 and 331, or 13 and 332, or 13 and 472 are wild type, are excluded,
c. the mutated proteins which contain 12 mutations and in which the amino acids at the following positions 13 and 331 and 332, are wild type, are excluded, or
d. when said mutated protein has 14 mutations and a wild type amino acid in position 13, or has 15 mutations, said mutated protein contains a nine amino acid extension at the C-terminus,
e. the truncated proteins wherein the mutated protein is only deleted of all amino acids located after the amino acid in position 477 or only after the amino acid in position 515, and which contain only one mutation at position 353 or 472, or which contain only two mutations at position 332 and 353, or 332 and 472, or 353 and 472, or contain only three mutations at the positions 332 and 353 and 472, are excluded, and
the truncated proteins that consist of the following sequence: SEQ ID NO: 188, SEQ ID NO: 198, SEQ ID NO: 266, SEQ ID NO: 320 and SEQ ID NO: 328, are excluded, or
a nucleic acid sequence coding for said mutated protein, or
a vector comprising a nucleic acid sequence coding for said mutated protein.

30. A method for the treatment of pathologies involving the stimulation of endothelial cell proliferation and/or migration, chosen among the group consisting of:
ischemic pathologies such as arteritis of lower limbs, myocardium infarct, cerebral vascular accidents, scleroderma, and Raynaud's disease
said method comprising the administration in a patient in a need thereof of a pharmaceutically effective amount of
an antibody, characterized in that it is specifically directed against a mutated protein comprising or consisting of the sequence of wild type netrin 4, represented by SEQ ID NO: 2, having from 1 to 15 mutations to said wild type protein, said mutated protein having a mutation at the amino acid at position 331, and said protein being possibly mutated in one at least of the amino acids at the following positions: 13, 68, 183, 205, 234, 332, 353, 472, 515, 589, 625, 626, 627 and 628
or, truncated protein derived from said mutated protein, wherein
the 19 first contiguous, or the 31 first contiguous amino acids at the N-terminus part of said mutated protein are deleted, and/or
said mutated protein being deleted of all the amino acids located after the amino acid in position 477 or of the all amino acids located after the amino acid in position 515,
with the proviso that
a. the mutated protein which contains 9 mutations and in which the amino acids at the positions 472 and 589 and 625 and 626 and 627 and 628 are wild type, is excluded,
b. the mutated proteins which contain 13 mutations and in which the amino acids at the positions 13 and 331, or 13 and 332, or 13 and 472 are wild type, are excluded,
c. the mutated proteins which contain 12 mutations and in which the amino acids at the following positions 13 and 331 and 332, are wild type, are excluded, or
d. when said mutated protein has 14 mutations and a wild type amino acid in position 13, or has 15 mutations, said mutated protein contains a nine amino acid extension at the C-terminus,
e. the truncated proteins wherein the mutated protein is only deleted of all amino acids located after the amino acid in position 477 or only after the amino acid in position 515, and which contain only one mutation at position 353 or 472, or which contain only two mutations at position 332 and 353, or 332 and 472, or 353 and 472, or contain only three mutations at the positions 332 and 353 and 472, are excluded, and
the truncated proteins that consist of the following sequence: SEQ ID NO: 188, SEQ ID NO: 198, SEQ ID NO: 266, SEQ ID NO: 320 and SEQ ID NO: 328, are excluded.

31. A method for the treatment of non-tumoral pathologies linked to or caused by a pericyte or smooth muscular cell rarefaction, and requiring an activation of pericyte or smooth muscular cell proliferation or migration, said non-tumoral pathologies being chosen from the group consisting of:
age-related macular degeneration,
neovascular glaucoma,
psoriasis,
atherosclerosis,
intestinal malformations,
Crohn's disease,
vascular or sub-cortical vascular dementia,
Alzheimer's disease,
bone degenerative pathologies, and fractures, and
aneurysms, and vascular dissections
said method comprising the administration in a patient in a need thereof of a pharmaceutically effective amount of
a mutated protein comprising or consisting of the sequence of wild type netrin 4, represented by SEQ ID NO: 2, having from 1 to 15 mutations to said wild type protein, said mutated protein having a mutation at the amino acid at position 331, and said protein being possibly mutated in one at least of the amino acids at the following positions: 13, 68, 183, 205, 234, 332, 353, 472, 515, 589, 625, 626, 627 and 628
or, truncated protein derived from said mutated protein, wherein
the 19 first contiguous, or the 31 first contiguous amino acids at the N-terminus part of said mutated protein are deleted, and/or
said mutated protein being deleted of all the amino acids located after the amino acid in position 477 or of the all amino acids located after the amino acid in position 515,
with the proviso that
a. the mutated protein which contains 9 mutations and in which the amino acids at the positions 472 and 589 and 625 and 626 and 627 and 628 are wild type, is excluded,
b. the mutated proteins which contain 13 mutations and in which the amino acids at the positions 13 and 331, or 13 and 332, or 13 and 472 are wild type, are excluded,
c. the mutated proteins which contain 12 mutations and in which the amino acids at the following positions 13 and 331 and 332, are wild type, are excluded, or
d. when said mutated protein has 14 mutations and a wild type amino acid in position 13, or has 15 mutations, said mutated protein contains a nine amino acid extension at the C-terminus,
e. the truncated proteins wherein the mutated protein is only deleted of all amino acids located after the amino acid in position 477 or only after the amino acid in position 515, and which contain only one mutation at position 353 or 472, or which contain only two mutations at position 332 and 353, or 332 and 472, or 353 and 472, or contain only three mutations at the positions 332 and 353 and 472, are excluded, and
the truncated proteins that consist of the following sequence: SEQ ID NO: 188, SEQ ID NO: 198, SEQ ID NO: 266, SEQ ID NO: 320 and SEQ ID NO: 328, are excluded,
a nucleic acid sequence coding for said mutated protein, or
a vector comprising a nucleic acid sequence coding for said mutated protein.

32. A method for the treatment of cancers, comprising the administration in a patient in a need thereof of a pharmaceutically effective amount of
a mutated protein consisting of one of the following sequences SEQ ID NO: 80, SEQ ID NO: 84, SEQ ID NO: 86, SEQ ID NO: 88, SEQ ID NO: 96, SEQ ID NO: 98, SEQ ID NO: 100, SEQ ID NO: 108, SEQ ID NO: 112, SEQ ID NO: 120, SEQ ID NO: 122, SEQ ID NO: 124, SEQ ID NO: 126, SEQ ID NO: 128, SEQ ID NO: 130, SEQ ID NO: 132, SEQ ID NO: 134, SEQ ID NO: 138, SEQ ID NO: 140, SEQ ID NO: 142, SEQ ID NO: 150, SEQ ID NO: 152, SEQ ID NO: 154, SEQ ID NO: 162, SEQ ID NO: 166, SEQ ID NO: 174, SEQ ID NO: 176, SEQ ID NO: 178, SEQ ID NO: 180, SEQ ID NO: 182, SEQ ID NO: 184 and SEQ ID NO: 186,
in association with a chemotherapy agent, said chemotherapy agent being chosen from the group consisting of: doxorubicin, methotrexate, vinblastine, vincristine, cladribine, fluorouracil, cytarabine, anthracyclines, cisplatin, cyclophosphamide, fludarabine, gemcitabine, aromatase inhibitors, irinotecan, navelbine, oxaliplatin, taxol, and docetaxel.

33. A pharmaceutical composition comprising
a mutated protein consisting of one of the following sequences SEQ ID NO: 80, SEQ ID NO: 84, SEQ ID NO: 86, SEQ ID NO: 88, SEQ ID NO: 96, SEQ ID NO: 98, SEQ ID NO: 100, SEQ ID NO: 108, SEQ ID NO: 112, SEQ ID NO: 120, SEQ ID NO: 122, SEQ ID NO: 124, SEQ ID NO: 126, SEQ ID NO: 128, SEQ ID NO: 130, SEQ ID NO: 132, SEQ ID NO: 134, SEQ ID NO: 138, SEQ ID NO: 140, SEQ ID NO: 142, SEQ ID NO: 150, SEQ ID NO: 152, SEQ ID NO: 154, SEQ ID NO: 162, SEQ ID NO: 166, SEQ ID NO: 174, SEQ ID NO: 176, SEQ ID NO: 178, SEQ ID NO: 180, SEQ ID NO: 182, SEQ ID NO: 184 and SEQ ID NO: 186, and
a chemotherapy agent,
in association with a pharmaceutically acceptable carrier, said chemotherapy agent being chosen from the group consisting of: doxorubicin, methotrexate, vinblastine, vincristine, cladribine, fluorouracil, cytarabine, anthracyclines, cisplatin, cyclophosphamide, fludarabine, gemcitabine, aromatase inhibitors, irinotecan, navelbine, oxaliplatin, taxol, and docetaxel.

34. A method for treating tumoral and non tumoral pathologies chosen from the group consisting of: cancers and leukaemia, myopia-complicating choroidal neovascularization, cornea neovascularization, in particular graft rejection, glaucoma, diabetic retinopathies or premature retinopathies, rheumatoid arthritis, psoriasis arthritis, angioma, angiosarcoma, Castleman's disease, and Kaposi's sarcoma, or for the treatment of obesity or retinal neovascularization,
said method comprising the administration in a patient in a need thereof of a pharmaceutically effective amount of
a mutated protein derived from netrin 4 represented by the sequence SEQ ID NO: 2 comprising or consisting of
SEQ ID NO: 6 or SEQ ID NO: 8, or
the sequence of netrin 4, represented by SEQ ID NO: 2, containing
one or two or three or four mutations and characterized in that it consists of one of the following sequence SEQ ID NO: 2q, q varying from 31 to 32 and from 33 to 39, or
ten or eleven or twelve or thirteen or fourteen mutations and characterized in that it consists of one of the following sequence of SEQ ID NO: 2q, q varying from 6 to 8, from 12 to 14, 18, 20, from 23 to 24, and 29, or
a truncated mutated protein derived from said mutated protein, consisting of one of the following sequences SEQ ID NO: 80, SEQ ID NO: 84, SEQ ID NO: 86, SEQ ID NO: 88, SEQ ID NO: 96, SEQ ID NO: 98, SEQ ID NO: 100, SEQ ID NO: 108, SEQ ID NO: 112, SEQ ID NO: 120, SEQ ID NO: 122, SEQ ID NO: 124, SEQ ID NO: 126, SEQ ID NO: 128, SEQ ID NO: 130, SEQ ID NO: 132, SEQ ID NO: 134, SEQ ID NO: 138, SEQ ID NO: 140, SEQ ID NO: 142, SEQ ID NO: 150, SEQ ID NO: 152, SEQ ID NO: 154, SEQ ID NO: 162, SEQ ID NO: 166, SEQ ID NO: 174, SEQ ID NO: 176, SEQ ID NO: 178, SEQ ID NO: 180, SEQ ID NO: 182, SEQ ID NO: 184, SEQ ID NO: 186, SEQ ID NO: 190, SEQ ID NO: 194, SEQ ID NO: 196, SEQ ID NO: 206, SEQ ID NO: 208, SEQ ID NO: 210, SEQ ID NO: 218, SEQ ID NO: 222, SEQ ID NO: 228, SEQ ID NO: 230, SEQ ID NO: 232, SEQ ID NO: 240, SEQ ID NO: 244, SEQ ID NO: 252, SEQ ID NO: 254, SEQ ID NO: 256, SEQ ID NO: 258, SEQ ID NO: 260, SEQ ID NO: 262, SEQ ID NO: 264, SEQ ID NO: 270, SEQ ID NO: 272, SEQ ID NO: 274, SEQ ID NO: 282, SEQ ID NO: 284, SEQ ID NO: 286, SEQ ID NO: 294, SEQ ID NO: 298, SEQ ID NO: 306, SEQ ID NO: 308, SEQ ID NO: 310, SEQ ID NO: 312, SEQ ID NO: 314, SEQ ID NO: 316, SEQ ID NO: 318, SEQ ID NO: 324, SEQ ID NO: 326, SEQ ID NO: 336, SEQ ID NO: 338, SEQ ID NO: 340, SEQ ID NO: 348, SEQ ID NO: 352, SEQ ID NO: 360, SEQ ID NO: 362, SEQ ID NO: 364, SEQ ID NO: 366, SEQ ID NO: 368, SEQ ID NO: 370, SEQ ID NO: 372, SEQ ID NO: 374, SEQ ID NO: 376, SEQ ID NO: 380, SEQ ID NO: 382, SEQ ID NO: 384, SEQ ID NO: 392, SEQ ID NO: 394, SEQ ID NO: 396, SEQ ID NO: 404, SEQ ID NO: 408, SEQ ID NO: 414, SEQ ID NO: 416, SEQ ID NO: 418, SEQ ID NO: 426, SEQ ID NO: 430, SEQ ID NO: 438, SEQ ID NO: 440, SEQ ID NO: 442, SEQ ID NO: 444, SEQ ID NO: 446, SEQ ID NO: 448, SEQ ID NO: 450, SEQ ID NO: 452, SEQ ID NO: 456, SEQ ID NO: 458, SEQ ID NO: 460, SEQ ID NO: 468, SEQ ID NO: 470, SEQ ID NO: 472, SEQ ID NO: 480, SEQ ID NO: 484, SEQ ID NO: 492, SEQ ID NO: 494, SEQ ID NO: 496, SEQ ID NO: 498, SEQ ID NO: 500, SEQ ID NO: 502, SEQ ID NO: 504, SEQ ID NO: 506, SEQ ID NO: 510, SEQ ID NO: 512, SEQ ID NO: 514, SEQ ID NO: 522, SEQ ID NO: 524, SEQ ID NO: 526, SEQ ID NO: 534, SEQ ID NO: 538, SEQ ID NO: 546, SEQ ID NO: 548, SEQ ID NO: 550, SEQ ID NO: 552, SEQ ID NO: 554, SEQ ID NO: 556 and SEQ ID NO: 558,
in association with an anti-angiogenic agent chosen in particular from the group consisting of: AVASTIN (bevacizumab), MACUGEN (pegaptanib), and LUCENTIS (ranibizumab), or any other anti-VEGF agent, humanized antibodies against neuropiline-1 or any other anti-VEGF agent or any other anti-VEGF agent, such as SUTENT (sunitinib) or NEXAVAR (Sorafenib) as well as humanized antibodies against DLL4 or agents interfering with the angiopoietins pathways such as AM 386,

35. The method according to claim 33, wherein said mutated protein and said anti-angiogenic agent are administered simultaneously, separately or in a sequential way.
